(19) United States
(12) Patent Application Publication
(10) Pub. No.: US 2024/0318176 A1
(43) Pub. Date: Sep. 26, 2024

(54) MUSCLE TARGETING COMPLEXES AND USES THEREOF FOR TREATING DYSTROPHINOPATHIES

(71) Applicant: Dyne Therapeutics, Inc., Waltham, MA (US)

(72) Inventors: Cody A. Desjardins, Waltham, MA (US); Kim Tang, Waltham, MA (US); James McSwiggen, Arvada, CO (US); Romesh R. Subramanian, Framingham, MA (US); Timothy Weeden, Waltham, MA (US); Mohammed T. Qatanani, Waltham, MA (US); Brendan Quinn, Waltham, MA (US); John Najim, Waltham, MA (US)

(73) Assignee: Dyne Therapeutics, Inc., Waltham, MA (US)

(21) Appl. No.: 18/577,374

(22) PCT Filed: Jul. 8, 2022
(86) PCT No.: PCT/US2022/073527

§ 371 Date: Jan. 8, 2024

Related U.S. Application Data
(60) Provisional application No. 63/219,999, filed on Jul. 9, 2021.

(51) Int. Cl. C12N 15/113; A61K 39/00; A61K 47/68; C07K 16/28

(52) U.S. Cl. CPC C12N 15/113; A61K 47/6807; A61K 47/6849; C07K 16/2881; A61K 2039/505; C07K 2317/55; C12N 2310/11; C12N 2310/3233; C12N 2310/3513; C12N 2320/32; C12N 2320/33

(57) ABSTRACT

Aspects of the disclosure relate to complexes comprising a muscle-targeting agent covalently linked to a molecular payload. In some embodiments, the muscle-targeting agent specifically binds to an internalizing cell surface receptor on muscle cells. In some embodiments, the molecular payload promotes the expression or activity of a functional dystrophin protein. In some embodiments, the molecular payload is an oligonucleotide, such as an antisense oligonucleotide, e.g., an oligonucleotide that causes exon skipping in a mRNA expressed from a mutant DMD allele.

### RELATED APPLICATIONS

[0001] This application claims priority under 35 U.S.C. § 119(e) to U.S. Provisional Application Ser. No. 63/219,999, entitled “MUSCLE TARGETING COMPLEXES AND USES THEREOF FOR TREATING DYSTROPHINOPATHIES”, filed on Jul. 9, 2021, the contents of which are incorporated herein by reference in their entirety.

### FIELD OF THE INVENTION

[0002] The present application relates to targeting complexes for delivering molecular payloads (e.g., oligonucleotides) to cells and uses thereof, particularly uses relating to treatment of disease.

### REFERENCE TO AN ELECTRONIC SEQUENCE LISTING

[0003] The contents of the electronic sequence listing (D082470065WO00-SEQ-COB.xml; Size: 2,801,833 bytes; and Date of Creation: Jul. 7, 2022) is herein incorporated by reference in its entirety.

### BACKGROUND OF INVENTION

[0004] Dystrophinopathies are a group of distinct neuromuscular diseases that result from mutations in the gene encoding dystrophin. Dystrophinopathies include Duchenne muscular dystrophy, Becker muscular dystrophy, and X-linked dilated cardiomyopathy. The DMD gene (“DMD”), which encodes dystrophin, is a large gene, containing 79 exons and about 2.6 million total base pairs. Numerous mutations in DMD, including exonic frameshift, deletion, substitution, and duplicative mutations, are able to diminish the expression of functional dystrophin, leading to dystrophinopathies. Several agents that target exons of human DMD have been approved by the U.S. Food and Drug Administration (FDA), including casimersen, viltolarsen, golodirsen, and eteplirsen.

### SUMMARY OF INVENTION

[0005] According to some aspects, the disclosure provides complexes that target muscle cells for purposes of delivering molecular payloads to those cells, as well as molecular payloads that can be used therein. In some embodiments, complexes provided herein are particularly useful for delivering molecular payloads that increase or restore expression or activity of functional dystrophin protein. In some embodiments, complexes comprise oligonucleotide based molecular payloads that promote expression of functional dystrophin protein through an in-frame exon skipping mechanism or suppression of stop codons, such as by facilitating skipping of DMD exon 55. In some embodiments, molecular payloads provided herein are useful for facilitating exon skipping in a DMD sequence, such as skipping of DMD exon 55. Accordingly, in some embodiments, complexes provided herein comprise muscle-targeting agents (e.g., muscle targeting antibodies) that specifically bind to receptors on the surface of muscle cells for purposes of delivering molecular payloads to the muscle cells. In some embodiments, the complexes are taken up into the cells via a receptor mediated internalization, following which the molecular payload may be released to perform a function inside the cells. For example, complexes engineered to deliver oligonucleotides may release the oligonucleotides such that the oligonucleotides can promote expression of functional dystrophin protein (e.g., through an exon skipping mechanism, such as by facilitating skipping of DMD exon 55) in the muscle cells. In some embodiments, the oligonucleotides are released by endosomal cleavage of covalent linkers connecting oligonucleotides and muscle-targeting agents of the complexes. Complexes and molecular payloads provided herein can be used for treating subjects having a mutated DMD gene, such as a mutated DMD gene that is amenable to exon 55 skipping.

[0006] According to some aspects, complexes comprising an anti-transferrin receptor 1 (TfR1) antibody covalently linked to an oligonucleotide configured for inducing skipping of exon 55 in a DMD pre-mRNA are provided herein, wherein the oligonucleotide comprises a region of complementarity that is complementary with at least 8 consecutive nucleotides of any one of SEQ ID NOs: 160-779.

[0007] In some embodiments, the anti-TfR1 antibody comprises:
[0008] (i) a heavy chain complementarity determining region 1 (CDR-H1) of SEQ ID NO: 33, a heavy chain complementarity determining region 2 (CDR-H2) of SEQ ID NO: 34, a heavy chain complementarity determining region 3 (CDR-H3) of SEQ ID NO: 35, a light chain complementarity determining region 1 (CDR-L1) of SEQ ID NO: 36, a light chain complementarity determining region 2 (CDR-L2) of SEQ ID NO: 37, and a light chain complementarity determining region 3 (CDR-L3) of SEQ ID NO: 32;
[0009] (ii) a CDR-H1 of SEQ ID NO: 7, a CDR-H2 of SEQ ID NO: 8, a CDR-H3 of SEQ ID NO: 9, a CDR-L1 of SEQ ID NO: 10, a CDR-L2 of SEQ ID NO: 11, and a CDR-L3 of SEQ ID NO: 6;
[0010] (iii) a CDR-H1 of SEQ ID NO: 7, a CDR-H2 of SEQ ID NO: 20, a CDR-H3 of SEQ ID NO: 9, a CDR-L1 of SEQ ID NO: 10, a CDR-L2 of SEQ ID NO: 11, and a CDR-L3 of SEQ ID NO: 6;
[0011] (iv) a CDR-H1 of SEQ ID NO: 7, a CDR-H2 of SEQ ID NO: 24, a CDR-H3 of SEQ ID NO: 9, a CDR-L1 of SEQ ID NO: 10, a CDR-L2 of SEQ ID NO: 11, and a CDR-L3 of SEQ ID NO: 6;
[0012] (v) a CDR-H1 of SEQ ID NO: 51, a CDR-H2 of SEQ ID NO: 52, a CDR-H3 of SEQ ID NO: 53, a CDR-L1 of SEQ ID NO: 54, a CDR-L2 of SEQ ID NO: 55, and a CDR-L3 of SEQ ID NO: 50;
[0013] (vi) a CDR-H1 of SEQ ID NO: 64, a CDR-H2 of SEQ ID NO: 52, a CDR-H3 of SEQ ID NO: 53, a CDR-L1 of SEQ ID NO: 54, a CDR-L2 of SEQ ID NO: 55, and a CDR-L3 of SEQ ID NO: 50; or
[0014] (vii) a CDR-H1 of SEQ ID NO: 67, a CDR-H2 of SEQ ID NO: 52, a CDR-H3 of SEQ ID NO: 53, a CDR-L1 of SEQ ID NO: 54, a CDR-L2 of SEQ ID NO: 55, and a CDR-L3 of SEQ ID NO: 50.

[0015] In some embodiments, the anti-TfR1 antibody comprises:
[0016] (i) a heavy chain variable region (VH) comprising an amino acid sequence at least 85% identical to SEQ ID NO: 76; and/or a light chain variable region (VL) comprising an amino acid sequence at least 85% identical to SEQ ID NO: 75;
[0017] (ii) a VH comprising an amino acid sequence at least 85% identical to SEQ ID NO: 69; and/or a VL comprising an amino acid sequence at least 85% identical to SEQ ID NO: 70;
[0018] (iii) a VH comprising an amino acid sequence at least 85% identical to SEQ ID NO: 71; and/or a VL comprising an amino acid sequence at least 85% identical to SEQ ID NO: 70;
[0019] (iv) a VH comprising an amino acid sequence at least 85% identical to SEQ ID NO: 72; and/or a VL comprising an amino acid sequence at least 85% identical to SEQ ID NO: 70;
[0020] (v) a VH comprising an amino acid sequence at least 85% identical to SEQ ID NO: 73; and/or a VL comprising an amino acid sequence at least 85% identical to SEQ ID NO: 74;
[0021] (vi) a VH comprising an amino acid sequence at least 85% identical to SEQ ID NO: 73; and/or a VL comprising an amino acid sequence at least 85% identical to SEQ ID NO: 75;
[0022] (vii) a VH comprising an amino acid sequence at least 85% identical to SEQ ID NO: 76; and/or a VL comprising an amino acid sequence at least 85% identical to SEQ ID NO: 74;
[0023] (viii) a VH comprising an amino acid sequence at least 85% identical to SEQ ID NO: 77; and/or a VL comprising an amino acid sequence at least 85% identical to SEQ ID NO: 78;
[0024] (ix) a VH comprising an amino acid sequence at least 85% identical to SEQ ID NO: 79; and/or a VL comprising an amino acid sequence at least 85% identical to SEQ ID NO: 80; or
[0025] (x) a VH comprising an amino acid sequence at least 85% identical to SEQ ID NO: 77; and/or a VL comprising an amino acid sequence at least 85% identical to SEQ ID NO: 80.

[0026] In some embodiments, the anti-TfR1 antibody comprises:
[0027] (i) a VH comprising the amino acid sequence of SEQ ID NO: 76 and a VL comprising the amino acid sequence of SEQ ID NO: 75;
[0028] (ii) a VH comprising the amino acid sequence of SEQ ID NO: 69 and a VL comprising the amino acid sequence of SEQ ID NO: 70;
[0029] (iii) a VH comprising the amino acid sequence of SEQ ID NO: 71 and a VL comprising the amino acid sequence of SEQ ID NO: 70;
[0030] (iv) a VH comprising the amino acid sequence of SEQ ID NO: 72 and a VL comprising the amino acid sequence of SEQ ID NO: 70;
[0031] (v) a VH comprising the amino acid sequence of SEQ ID NO: 73 and a VL comprising the amino acid sequence of SEQ ID NO: 74;
[0032] (vi) a VH comprising the amino acid sequence of SEQ ID NO: 73 and a VL comprising the amino acid sequence of SEQ ID NO: 75;
[0033] (vii) a VH comprising the amino acid sequence of SEQ ID NO: 76 and a VL comprising the amino acid sequence of SEQ ID NO: 74;
[0034] (viii) a VH comprising the amino acid sequence of SEQ ID NO: 77 and a VL comprising the amino acid sequence of SEQ ID NO: 78;
[0035] (ix) a VH comprising the amino acid sequence of SEQ ID NO: 79 and a VL comprising the amino acid sequence of SEQ ID NO: 80; or
[0036] (x) a VH comprising the amino acid sequence of SEQ ID NO: 77 and a VL comprising the amino acid sequence of SEQ ID NO: 80.

[0037] In some embodiments, the anti-TfR1 antibody is a Fab fragment, a Fab′ fragment, a F(ab′)2 fragment, an scFv, an Fv, or a full-length IgG.

[0038] In some embodiments, the anti-TfR1 antibody is a Fab fragment.

[0039] In some embodiments, the anti-TfR1 antibody comprises:
[0040] (i) a heavy chain comprising an amino acid sequence at least 85% identical to SEQ ID NO: 101; and/or a light chain comprising an amino acid sequence at least 85% identical to SEQ ID NO: 90;
[0041] (ii) a heavy chain comprising an amino acid sequence at least 85% identical to SEQ ID NO: 97; and/or a light chain comprising an amino acid sequence at least 85% identical to SEQ ID NO: 85;
[0042] (iii) a heavy chain comprising an amino acid sequence at least 85% identical to SEQ ID NO: 98; and/or a light chain comprising an amino acid sequence at least 85% identical to SEQ ID NO: 85;
[0043] (iv) a heavy chain comprising an amino acid sequence at least 85% identical to SEQ ID NO: 99; and/or a light chain comprising an amino acid sequence at least 85% identical to SEQ ID NO: 85;
[0044] (v) a heavy chain comprising an amino acid sequence at least 85% identical to SEQ ID NO: 100; and/or a light chain comprising an amino acid sequence at least 85% identical to SEQ ID NO: 89;
[0045] (vi) a heavy chain comprising an amino acid sequence at least 85% identical to SEQ ID NO: 100; and/or a light chain comprising an amino acid sequence at least 85% identical to SEQ ID NO: 90;
[0046] (vii) a heavy chain comprising an amino acid sequence at least 85% identical to SEQ ID NO: 101; and/or a light chain comprising an amino acid sequence at least 85% identical to SEQ ID NO: 89;
[0047] (viii) a heavy chain comprising an amino acid sequence at least 85% identical to SEQ ID NO: 102; and/or a light chain comprising an amino acid sequence at least 85% identical to SEQ ID NO: 93;
[0048] (ix) a heavy chain comprising an amino acid sequence at least 85% identical to SEQ ID NO: 103; and/or a light chain comprising an amino acid sequence at least 85% identical to SEQ ID NO: 95; or
[0049] (x) a heavy chain comprising an amino acid sequence at least 85% identical to SEQ ID NO: 102; and/or a light chain comprising an amino acid sequence at least 85% identical to SEQ ID NO: 95.

[0050] In some embodiments, the anti-TfR1 antibody comprises:
[0051] (i) a heavy chain comprising the amino acid sequence of SEQ ID NO: 101; and a light chain comprising the amino acid sequence of SEQ ID NO: 90;
[0052] (ii) a heavy chain comprising the amino acid sequence of SEQ ID NO: 97; and a light chain comprising the amino acid sequence of SEQ ID NO: 85;
[0053] (iii) a heavy chain comprising the amino acid sequence of SEQ ID NO: 98; and a light chain comprising the amino acid sequence of SEQ ID NO: 85;
[0054] (iv) a heavy chain comprising the amino acid sequence of SEQ ID NO: 99; and a light chain comprising the amino acid sequence of SEQ ID NO: 85;
[0055] (v) a heavy chain comprising the amino acid sequence of SEQ ID NO: 100; and a light chain comprising the amino acid sequence of SEQ ID NO: 89;
[0056] (vi) a heavy chain comprising the amino acid sequence of SEQ ID NO: 100; and a light chain comprising the amino acid sequence of SEQ ID NO: 90;
[0057] (vii) a heavy chain comprising the amino acid sequence of SEQ ID NO: 101; and a light chain comprising the amino acid sequence of SEQ ID NO: 89;
[0058] (viii) a heavy chain comprising the amino acid sequence of SEQ ID NO: 102; and a light chain comprising the amino acid sequence of SEQ ID NO: 93;
[0059] (ix) a heavy chain comprising the amino acid sequence of SEQ ID NO: 103; and a light chain comprising the amino acid sequence of SEQ ID NO: 95; or
[0060] (x) a heavy chain comprising the amino acid sequence of SEQ ID NO: 102; and a light chain comprising the amino acid sequence of SEQ ID NO: 95.

[0061] In some embodiments, the anti-TfR1 antibody does not specifically bind to the transferrin binding site of the transferrin receptor 1 and/or the anti-TfR1 antibody does not inhibit binding of transferrin to the transferrin receptor 1.

[0062] In some embodiments, the oligonucleotide comprises a region of complementarity to at least 4 consecutive nucleotides of a splicing feature of the DMD pre-mRNA.

[0063] In some embodiments, the splicing feature is an exonic splicing enhancer (ESE) in exon 55 of the DMD pre-mRNA, optionally wherein the ESE comprises a sequence of any one of SEQ ID NOs: 2031-2061.

[0064] In some embodiments, the splicing feature is a branch point, a splice donor site, or a splice acceptor site, optionally wherein the splicing feature is across the junction of exon 54 and intron 54, in intron 54, across the junction of intron 54 and exon 55, across the junction of exon 55 and intron 55, in intron 55, or across the junction of intron 55 and exon 56 of the DMD pre-mRNA, and further optionally wherein the splicing feature comprises a sequence of any one of SEQ ID NOs: 2028-2030, 2062, and 2063.

[0065] In some embodiments, the oligonucleotide comprises a sequence complementary to any one of SEQ ID NOs: 160-779 or comprises a sequence of any one of SEQ ID NOs: 780-2019, wherein each thymine base (T) may independently and optionally be replaced with a uracil base (U), and each U may independently and optionally be replaced with a T.

[0066] In some embodiments, the oligonucleotide comprises a sequence of any one of SEQ ID NOs: 1400, 1402-1406, 1408, 1409, 1413, 1418-1420, 1483-1491, 1493, 1495, 1496, 1502-1506, 1508, 1510-1512, 1514, 1522-1524, 1529-1531, 1534, 1535, 1559, 1583, 1587, 1591, 1596, 1597, 1598, 1604, 1606, 1607, 1638, 1641, 1693-1695, 1702, 1703, 1766, 1813, 1988, and 1995, wherein each thymine base (T) may independently and optionally be replaced with a uracil base (U), and each U may independently and optionally be replaced with a T.

[0067] In some embodiments, the oligonucleotide comprises one or more phosphorodiamidate morpholinos, optionally wherein the oligonucleotide is a phosphorodiamidate morpholino oligomer (PMO).

[0068] In some embodiments, the anti-TfR1 antibody is covalently linked to the oligonucleotide via a cleavable linker, optionally wherein the cleavable linker comprises a valine-citrulline sequence.

[0069] In some embodiments, the anti-TfR1 antibody is covalently linked to the oligonucleotide via conjugation to a lysine residue or a cysteine residue of the antibody.

[0070] According to some aspects, oligonucleotides that target DMD are provided herein, wherein the oligonucleotide comprises a region of complementarity to any one of SEQ ID NOs: 160-779, optionally wherein the region of complementarity comprises at least 15 consecutive nucleosides complementary to any one of SEQ ID NOs: 160-779.

[0071] In some embodiments, the oligonucleotide comprises at least 15 consecutive nucleosides of any one of SEQ ID NOs: 780-2019, optionally wherein the oligonucleotide comprises a sequence of any one of SEQ ID NOs: 780-2019, wherein each thymine base (T) may independently and optionally be replaced with a uracil base (U), and each U may independently and optionally be replaced with a T.

[0072] According to some aspects, methods of delivering an oligonucleotide to a cell are provided herein, the method comprising contacting the cell with a complex disclosed herein or with an oligonucleotide disclosed herein.

[0073] According to some aspects, methods of promoting the expression or activity of a dystrophin protein in a cell are provided herein, the method comprising contacting the cell with a complex disclosed herein or with an oligonucleotide disclosed herein in an amount effective for promoting internalization of the oligonucleotide to the cell, optionally wherein the cell is a muscle cell.

[0074] In some embodiments, the cell comprises a DMD gene that is amenable to skipping of exon 55.

[0075] In some embodiments, the dystrophin protein is a truncated dystrophin protein.

### BRIEF DESCRIPTION OF THE DRAWINGS

[0076] FIG. 1 shows data illustrating that conjugates containing anti-TfR1 Fab (3M12 VH4/Vκ3) conjugated to a DMD exon-skipping oligonucleotide resulted in enhanced exon skipping compared to the naked DMD exon skipping oligo in Duchenne muscular dystrophy patient myotubes.

### DETAILED DESCRIPTION OF INVENTION

[0077] Aspects of the disclosure relate to a recognition that while certain molecular payloads (e.g., oligonucleotides, peptides, small molecules) can have beneficial effects in muscle cells, it has proven challenging to effectively target such cells. Accordingly, as described herein, the present disclosure provides complexes comprising muscle-targeting agents covalently linked to molecular payloads in order to overcome such challenges. In some embodiments, the complexes are particularly useful for delivering molecular payloads that modulate (e.g., promote) the expression or activity of dystrophin protein (e.g., a truncated dystrophin protein) or DMD (e.g., a mutated DMD allele). In some embodiments, complexes provided herein may comprise oligonucleotides that promote expression and activity of dystrophin protein or DMD, such as by facilitating in-frame exon skipping and/or suppression of premature stop codons. For example, complexes may comprise oligonucleotides that induce skipping of exon(s) of DMD RNA (e.g., pre-mRNA), such as oligonucleotides that induce skipping of exon 55. In some embodiments, synthetic nucleic acid payloads (e.g., DNA or RNA payloads) may be used that express one or more proteins that promote normal expression and activity of dystrophin protein or DMD.

[0078] Duchenne muscular dystrophy is an X-linked muscular disorder caused by one or more mutations in the DMD gene located on Xp21. Dystrophin protein typically forms the dystrophin-associated glycoprotein complex (DGC) at the sarcolemma, which links the muscle sarcomeric structure to the extracellular matrix and protects the sarcolemma from contraction-induced injury. In patients with Duchenne muscular dystrophy, the dystrophin protein is generally absent and muscle fibers typically become damaged due to mechanical overextension. Mutations in the DMD gene are associated with two types of muscular dystrophy, Duchenne muscular dystrophy and Becker muscular dystrophy, depending on whether the translational reading frame is lost or maintained. Becker muscular dystrophy is a clinically milder form of Duchenne muscular dystrophy, and is characterized by features similar to Duchenne muscular dystrophy. In some embodiments, exon skipping induced by oligonucleotides (e.g., delivered using complexes provided herein) can be used to restore the reading frame of a mutated DMD allele resulting in production of a truncated dystrophin protein that is sufficiently functional to improve muscle function. In some embodiments, such exon skipping converts a Duchenne muscular dystrophy phenotype into a milder Becker muscular dystrophy phenotype.

[0079] Further aspects of the disclosure, including a description of defined terms, are provided below.

### I. Definitions

[0080] Administering: As used herein, the terms “administering” or “administration” means to provide a complex to a subject in a manner that is physiologically and/or (e.g., and) pharmacologically useful (e.g., to treat a condition in the subject).

[0081] Approximately: As used herein, the term “approximately” or “about,” as applied to one or more values of interest, refers to a value that is similar to a stated reference value. In certain embodiments, the term “approximately” or “about” refers to a range of values that fall within 15%, 14%, 13%, 12%, 11%, 10%, 9%, 8%, 7%, 6%, 5%, 4%, 3%, 2%, 1%, or less in either direction (greater than or less than) of the stated reference value unless otherwise stated or otherwise evident from the context (except where such number would exceed 100% of a possible value).

[0082] Antibody: As used herein, the term “antibody” refers to a polypeptide that includes at least one immunoglobulin variable domain or at least one antigenic determinant, e.g., paratope that specifically binds to an antigen. In some embodiments, an antibody is a full-length antibody. In some embodiments, an antibody is a chimeric antibody. In some embodiments, an antibody is a humanized antibody. However, in some embodiments, an antibody is a Fab fragment, a Fab′ fragment, a F(ab′)2 fragment, a Fv fragment or a scFv fragment. In some embodiments, an antibody is a nanobody derived from a camelid antibody or a nanobody derived from shark antibody. In some embodiments, an antibody is a diabody. In some embodiments, an antibody comprises a framework having a human germline sequence. In another embodiment, an antibody comprises a heavy chain constant domain selected from the group consisting of IgG, IgG1, IgG2, IgG2A, IgG2B, IgG2C, IgG3, IgG4, IgA1, IgA2, IgD, IgM, and IgE constant domains. In some embodiments, an antibody comprises a heavy (H) chain variable region (abbreviated herein as VH), and/or (e.g., and) a light (L) chain variable region (abbreviated herein as VL). In some embodiments, an antibody comprises a constant domain, e.g., an Fc region. An immunoglobulin constant domain refers to a heavy or light chain constant domain. Human IgG heavy chain and light chain constant domain amino acid sequences and their functional variations are known. With respect to the heavy chain, in some embodiments, the heavy chain of an antibody described herein can be an alpha (α), delta (Δ), epsilon (ε), gamma (γ) or mu (μ) heavy chain. In some embodiments, the heavy chain of an antibody described herein can comprise a human alpha (α), delta (Δ), epsilon (ε), gamma (γ) or mu (μ) heavy chain. In a particular embodiment, an antibody described herein comprises a human gamma 1 CH1, CH2, and/or (e.g., and) CH3 domain. In some embodiments, the amino acid sequence of the VH domain comprises the amino acid sequence of a human gamma (γ) heavy chain constant region, such as any known in the art. Non-limiting examples of human constant region sequences have been described in the art, e.g., see U.S. Pat. No. 5,693,780 and Kabat E A et al., (1991) supra. In some embodiments, the VH domain comprises an amino acid sequence that is at least 70%, 75%, 80%, 85%, 90%, 95%, 98%, or at least 99% identical to any of the variable chain constant regions provided herein. In some embodiments, an antibody is modified, e.g., modified via glycosylation, phosphorylation, sumoylation, and/or (e.g., and) methylation. In some embodiments, an antibody is a glycosylated antibody, which is conjugated to one or more sugar or carbohydrate molecules. In some embodiments, the one or more sugar or carbohydrate molecule are conjugated to the antibody via N-glycosylation, O-glycosylation, C-glycosylation, glypiation (GPI anchor attachment), and/or (e.g., and) phosphoglycosylation. In some embodiments, the one or more sugar or carbohydrate molecule are monosaccharides, disaccharides, oligosaccharides, or glycans. In some embodiments, the one or more sugar or carbohydrate molecule is a branched oligosaccharide or a branched glycan. In some embodiments, the one or more sugar or carbohydrate molecule includes a mannose unit, a glucose unit, an N-acetylglucosamine unit, an N-acetylgalactosamine unit, a galactose unit, a fucose unit, or a phospholipid unit. In some embodiments, an antibody is a construct that comprises a polypeptide comprising one or more antigen binding fragments of the disclosure linked to a linker polypeptide or an immunoglobulin constant domain. Linker polypeptides comprise two or more amino acid residues joined by peptide bonds and are used to link one or more antigen binding portions. Examples of linker polypeptides have been reported (see e.g., Holliger, P., et al. (1993) Proc. Natl. Acad. Sci. USA 90:6444-6448; Poljak, R. J., et al. (1994) Structure 2:1121-1123). Still further, an antibody may be part of a larger immunoadhesion molecule, formed by covalent or noncovalent association of the antibody or antibody portion with one or more other proteins or peptides. Examples of such immunoadhesion molecules include use of the streptavidin core region to make a tetrameric scFv molecule (Kipriyanov, S. M., et al. (1995) Human Antibodies and Hybridomas 6:93-101) and use of a cysteine residue, a marker peptide and a C-terminal polyhistidine tag to make bivalent and biotinylated scFv molecules (Kipriyanov, S. M., et al. (1994) Mol. Immunol. 31:1047-1058).

[0083] Branch point: As used herein, the term “branch point” or “branch site” refers to a nucleic acid sequence motif within an intron of a gene or pre-mRNA that is involved in splicing of pre-mRNA into mRNA (i.e., removing introns from the pre-mRNA), and can be referred to as a splicing feature. A branch point is typically located 18 to 40 nucleotides from the 3′ end of an intron, and contains an adenine but is otherwise relatively unrestricted in sequence. Common sequence motifs for branch points are YNYYRAY, YTRAC, and YNYTRAY, where Y is a pyrimidine, N is any nucleotide, R is any purine, and A is adenine. During splicing, the pre-mRNA is cleaved at the 5′ end of the intron, which then attaches to the branch point region downstream through transesterification bonding between guanines and adenines from the 5′ end and the branch point, respectively, to form a looped lariat structure.

[0084] CDR: As used herein, the term “CDR” refers to the complementarity determining region within antibody variable sequences. A typical antibody molecule comprises a heavy chain variable region (VH) and a light chain variable region (VL), which are usually involved in antigen binding. The VH and VL regions can be further subdivided into regions of hypervariability, also known as “complementarity determining regions” (“CDR”), interspersed with regions that are more conserved, which are known as “framework regions” (“FR”). Each VH and VL is typically composed of three CDRs and four FRs, arranged from amino-terminus to carboxy-terminus in the following order: FR1, CDR1, FR2, CDR2, FR3, CDR3, FR4. The extent of the framework region and CDRs can be precisely identified using methodology known in the art, for example, by the Kabat definition, the IMGT definition, the Chothia definition, the AbM definition, and/or (e.g., and) the contact definition, all of which are well known in the art. See, e.g., Kabat, E. A., et al. (1991) Sequences of Proteins of Immunological Interest, Fifth Edition, U.S. Department of Health and Human Services, NIH Publication No. 91-3242; IMGT®, the international ImMunoGeneTics information System® www.imgt.org, Lefranc, M.-P. et al., Nucleic Acids Res., 27:209-212 (1999); Ruiz, M. et al., Nucleic Acids Res., 28:219-221 (2000); Lefranc, M.-P., Nucleic Acids Res., 29:207-209 (2001); Lefranc, M.-P., Nucleic Acids Res., 31:307-310 (2003); Lefranc, M.-P. et al., In Silico Biol., 5, 0006 (2004) [Epub], 5:45-60 (2005); Lefranc, M.-P. et al., Nucleic Acids Res., 33:D593-597 (2005); Lefranc, M.-P. et al., Nucleic Acids Res., 37:D1006-1012 (2009); Lefranc, M.-P. et al., Nucleic Acids Res., 43:D413-422 (2015); Chothia et al., (1989) Nature 342:877; Chothia, C. et al. (1987) J. Mol. Biol. 196:901-917, Al-lazikani et al (1997) J. Molec. Biol. 273:927-948; and Almagro, J. Mol. Recognit. 17:132-143 (2004). See also bioinf.org.uk/abs. As used herein, a CDR may refer to the CDR defined by any method known in the art. Two antibodies having the same CDR means that the two antibodies have the same amino acid sequence of that CDR as determined by the same method, for example, the IMGT definition.

[0085] There are three CDRs in each of the variable regions of the heavy chain and the light chain, which are designated CDR1, CDR2 and CDR3, for each of the variable regions. The term “CDR set” as used herein refers to a group of three CDRs that occur in a single variable region capable of binding the antigen. The exact boundaries of these CDRs have been defined differently according to different systems. The system described by Kabat (Kabat et al., Sequences of Proteins of Immunological Interest (National Institutes of Health, Bethesda, Md. (1987) and (1991)) not only provides an unambiguous residue numbering system applicable to any variable region of an antibody, but also provides precise residue boundaries defining the three CDRs. These CDRs may be referred to as Kabat CDRs. Sub-portions of CDRs may be designated as L1, L2 and L3 or H1, H2 and H3 where the “L” and the “H” designates the light chain and the heavy chains regions, respectively. These regions may be referred to as Chothia CDRs, which have boundaries that overlap with Kabat CDRs. Other boundaries defining CDRs overlapping with the Kabat CDRs have been described by Padlan (FASEB J. 9:133-139 (1995)) and MacCallum (J Mol Biol 262(5):732-45 (1996)). Still other CDR boundary definitions may not strictly follow one of the above systems, but will nonetheless overlap with the Kabat CDRs, although they may be shortened or lengthened in light of prediction or experimental findings that particular residues or groups of residues or even entire CDRs do not significantly impact antigen binding. The methods used herein may utilize CDRs defined according to any of these systems. Examples of CDR definition systems are provided in Table 1.

TABLE 1
CDR Definitions

| | IMGT¹ | Kabat² | Chothia³ |
|---|---|---|---|
| CDR-H1 | 27-38 | 31-35 | 26-32 |
| CDR-H2 | 56-65 | 50-65 | 53-55 |
| CDR-H3 | 105-116/117 | 95-102 | 96-101 |
| CDR-L1 | 27-38 | 24-34 | 26-32 |
| CDR-L2 | 56-65 | 50-56 | 50-52 |
| CDR-L3 | 105-116/117 | 89-97 | 91-96 |

¹IMGT ®, the international ImMunoGeneTics information system ®, imgt.org, Lefranc, M.-P. et al., Nucleic Acids Res., 27: 209-212 (1999)
²Kabat et al. (1991) Sequences of Proteins of Immunological Interest, Fifth Edition, U.S. Department of Health and Human Services, NIH Publication No. 91-3242
³Chothia et al., J. Mol. Biol. 196: 901-917 (1987))

[0086] CDR-grafted antibody: The term “CDR-grafted antibody” refers to antibodies which comprise heavy and light chain variable region sequences from one species but in which the sequences of one or more of the CDR regions of VH and/or (e.g., and) VL are replaced with CDR sequences of another species, such as antibodies having murine heavy and light chain variable regions in which one or more of the murine CDRs (e.g., CDR3) has been replaced with human CDR sequences.

[0087] Chimeric antibody: The term “chimeric antibody” refers to antibodies which comprise heavy and light chain variable region sequences from one species and constant region sequences from another species, such as antibodies having murine heavy and light chain variable regions linked to human constant regions.

[0088] Complementary: As used herein, the term “complementary” refers to the capacity for precise pairing between two nucleosides or two sets of nucleosides. In particular, complementary is a term that characterizes an extent of hydrogen bond pairing that brings about binding between two nucleosides or two sets of nucleosides. For example, if a base at one position of an oligonucleotide is capable of hydrogen bonding with a base at the corresponding position of a target nucleic acid (e.g., an mRNA), then the bases are considered to be complementary to each other at that position. Base pairings may include both canonical Watson-Crick base pairing and non-Watson-Crick base pairing (e.g., Wobble base pairing and Hoogsteen base pairing). For example, in some embodiments, for complementary base pairings, adenosine-type bases (A) are complementary to thymidine-type bases (T) or uracil-type bases (U), that cytosine-type bases (C) are complementary to guanosine-type bases (G), and that universal bases such as 3-nitropyrrole or 5-nitroindole can hybridize to and are considered complementary to any A, C, U, or T. Inosine (I) has also been considered in the art to be a universal base and is considered complementary to any A, C, U or T.

[0089] Conservative amino acid substitution: As used herein, a “conservative amino acid substitution” refers to an amino acid substitution that does not alter the relative charge or size characteristics of the protein in which the amino acid substitution is made. Variants can be prepared according to methods for altering polypeptide sequence known to one of ordinary skill in the art such as are found in references which compile such methods, e.g. Molecular Cloning: A Laboratory Manual, J. Sambrook, et al., eds., Fourth Edition, Cold Spring Harbor Laboratory Press, Cold Spring Harbor, New York, 2012, or Current Protocols in Molecular Biology, F. M. Ausubel, et al., eds., John Wiley & Sons, Inc., New York. Conservative substitutions of amino acids include substitutions made amongst amino acids within the following groups: (a) M, I, L, V; (b) F, Y, W; (c) K, R, H; (d) A, G; (e) S, T; (f) Q, N; and (g) E, D.

[0090] Covalently linked: As used herein, the term “covalently linked” refers to a characteristic of two or more molecules being linked together via at least one covalent bond. In some embodiments, two molecules can be covalently linked together by a single bond, e.g., a disulfide bond or disulfide bridge, that serves as a linker between the molecules. However, in some embodiments, two or more molecules can be covalently linked together via a molecule that serves as a linker that joins the two or more molecules together through multiple covalent bonds. In some embodiments, a linker may be a cleavable linker. However, in some embodiments, a linker may be a non-cleavable linker.

[0091] Cross-reactive: As used herein and in the context of a targeting agent (e.g., antibody), the term “cross-reactive,” refers to a property of the agent being capable of specifically binding to more than one antigen of a similar type or class (e.g., antigens of multiple homologs, paralogs, or orthologs) with similar affinity or avidity. For example, in some embodiments, an antibody that is cross-reactive against human and non-human primate antigens of a similar type or class (e.g., a human transferrin receptor and non-human primate transferrin receptor) is capable of binding to the human antigen and non-human primate antigens with a similar affinity or avidity. In some embodiments, an antibody is cross-reactive against a human antigen and a rodent antigen of a similar type or class. In some embodiments, an antibody is cross-reactive against a rodent antigen and a non-human primate antigen of a similar type or class. In some embodiments, an antibody is cross-reactive against a human antigen, a non-human primate antigen, and a rodent antigen of a similar type or class.

[0092] DMD: As used herein, the term “DMD” refers to a gene that encodes dystrophin protein, a key component of the dystrophin-glycoprotein complex, which bridges the inner cytoskeleton and the extracellular matrix in muscle cells, particularly muscle fibers. Deletions, duplications, and point mutations in DMD may cause dystrophinopathies, such as Duchenne muscular dystrophy, Becker muscular dystrophy, or cardiomyopathy. Alternative promoter usage and alternative splicing result in numerous distinct transcript variants and protein isoforms for this gene. In some embodiments, a dystrophin gene (DMD or DMD gene) may be a human (Gene ID: 1756), non-human primate (e.g., Gene ID: 465559), or rodent gene (e.g., Gene ID: 13405; Gene ID: 24907). In addition, multiple human transcript variants (e.g., as annotated under GenBank RefSeq Accession Numbers: NM_000109.3, NM_004006.2, NM_004009.3, NM_004010.3 and NM_004011.3) have been characterized that encode different protein isoforms.

[0093] DMD allele: As used herein, the term “DMD allele” refers to any one of alternative forms (e.g., wild-type or mutant forms) of a DMD gene. In some embodiments, a DMD allele may encode for dystrophin that retains its normal and typical functions. In some embodiments, a DMD allele may comprise one or more mutations that results in muscular dystrophy. Common mutations that lead to Duchenne muscular dystrophy involve frameshift, deletion, substitution, and duplicative mutations of one or more of 79 exons present in a dystrophin allele, e.g., exon 8, exon 23, exon 41, exon 44, exon 45, exon 50, exon 51, exon 52, exon 53, or exon 55. Further examples of DMD mutations are disclosed, for example, in Flanigan K M, et al., Mutational spectrum of DMD mutations in dystrophinopathy patients: application of modern diagnostic techniques to a large cohort. Hum Mutat. 2009 December; 30 (12):1657-66, the contents of which are incorporated herein by reference in its entirety.

[0094] Dystrophinopathy: As used herein, the term “dystrophinopathy” refers to a muscle disease results from one or more mutated DMD alleles. Dystrophinopathies include a spectrum of conditions (ranging from mild to severe) that includes Duchenne muscular dystrophy, Becker muscular dystrophy, and DMD-associated dilated cardiomyopathy (DCM). In some embodiments, at one end of the spectrum, dystrophinopathy is phenotypically associated with an asymptomatic increase in serum concentration of creatine phosphokinase (CK) and/or (e.g., and) muscle cramps with myoglobinuria. In some embodiments, at the other end of the spectrum, dystrophinopathy is phenotypically associated with progressive muscle diseases that are generally classified as Duchenne or Becker muscular dystrophy when skeletal muscle is primarily affected and as DMD-associated dilated cardiomyopathy (DCM) when the heart is primarily affected. Symptoms of Duchenne muscular dystrophy include muscle loss or degeneration, diminished muscle function, pseudohypertrophy of the tongue and calf muscles, higher risk of neurological abnormalities, and a shortened lifespan. Duchenne muscular dystrophy is associated with Online Mendelian Inheritance in Man (OMIM) Entry #310200. Becker muscular dystrophy is associated with OMIM Entry #300376. Dilated cardiomyopathy is associated with OMIM Entry X #302045.

[0095] Exonic splicing enhancer (ESE): As used herein, the term “exonic splicing enhancer” or “ESE” refers to a nucleic acid sequence motif within an exon of a gene, pre-mRNA, or mRNA that directs or enhances splicing of pre-mRNA into mRNA, e.g., as described in Blencowe et al., Trends Biochem Sci 25, 106-10. (2000), incorporated herein by reference. ESEs can be referred to as splicing features. ESEs may direct or enhance splicing, for example, to remove one or more introns and/or one or more exons from a gene transcript. ESE motifs are typically 6-8 nucleobases in length. SR proteins (e.g., proteins encoded by the gene SRSF1, SRSF2, SRSF3, SRSF4, SRSF5, SRSF6, SRSF7, SRSF8, SRSF9, SRSF10, SRSF11, SRSF12, TRA2A or TRA2B) bind to ESEs through their RNA recognition motif region to facilitate splicing. ESE motifs can be identified through a number of methods, including those described in Cartegni et al., Nucleic Acids Research, 2003, Vol. 31, No. 13, 3568-3571, incorporated herein by reference.

[0096] Framework: As used herein, the term “framework” or “framework sequence” refers to the remaining sequences of a variable region minus the CDRs. Because the exact definition of a CDR sequence can be determined by different systems, the meaning of a framework sequence is subject to correspondingly different interpretations. The six CDRs (CDR-L1, CDR-L2, and CDR-L3 of light chain and CDR-H1, CDR-H2, and CDR-H3 of heavy chain) also divide the framework regions on the light chain and the heavy chain into four sub-regions (FR1, FR2, FR3 and FR4) on each chain, in which CDR1 is positioned between FR1 and FR2, CDR2 between FR2 and FR3, and CDR3 between FR3 and FR4. Without specifying the particular sub-regions as FR1, FR2, FR3 or FR4, a framework region, as referred by others, represents the combined FRs within the variable region of a single, naturally occurring immunoglobulin chain. As used herein, a FR represents one of the four sub-regions, and FRs represents two or more of the four sub-regions constituting a framework region. Human heavy chain and light chain acceptor sequences are known in the art. In one embodiment, the acceptor sequences known in the art may be used in the antibodies disclosed herein.

[0097] Human antibody: The term “human antibody”, as used herein, is intended to include antibodies having variable and constant regions derived from human germline immunoglobulin sequences. The human antibodies of the disclosure may include amino acid residues not encoded by human germline immunoglobulin sequences (e.g., mutations introduced by random or site-specific mutagenesis in vitro or by somatic mutation in vivo), for example in the CDRs and in particular CDR3. However, the term “human antibody”, as used herein, is not intended to include antibodies in which CDR sequences derived from the germline of another mammalian species, such as a mouse, have been grafted onto human framework sequences.

[0098] Humanized antibody: The term “humanized antibody” refers to antibodies which comprise heavy and light chain variable region sequences from a non-human species (e.g., a mouse) but in which at least a portion of the VH and/or (e.g., and) VL sequence has been altered to be more “human-like”, i.e., more similar to human germline variable sequences. One type of humanized antibody is a CDR-grafted antibody, in which human CDR sequences are introduced into non-human VH and VL sequences to replace the corresponding non-human CDR sequences. In one embodiment, humanized anti-TfR1 antibodies and antigen binding portions are provided. Such antibodies may be generated by obtaining murine anti-TfR1 monoclonal antibodies using traditional hybridoma technology followed by humanization using in vitro genetic engineering, such as those disclosed in Kasaian et al PCT publication No. WO 2005/123126 A2.

[0099] Internalizing cell surface receptor: As used herein, the term, “internalizing cell surface receptor” refers to a cell surface receptor that is internalized by cells, e.g., upon external stimulation, e.g., ligand binding to the receptor. In some embodiments, an internalizing cell surface receptor is internalized by endocytosis. In some embodiments, an internalizing cell surface receptor is internalized by clathrin-mediated endocytosis. However, in some embodiments, an internalizing cell surface receptor is internalized by a clathrin-independent pathway, such as, for example, phagocytosis, macropinocytosis, caveolae- and raft-mediated uptake or constitutive clathrin-independent endocytosis. In some embodiments, the internalizing cell surface receptor comprises an intracellular domain, a transmembrane domain, and/or (e.g., and) an extracellular domain, which may optionally further comprise a ligand-binding domain. In some embodiments, a cell surface receptor becomes internalized by a cell after ligand binding. In some embodiments, a ligand may be a muscle-targeting agent or a muscle-targeting antibody. In some embodiments, an internalizing cell surface receptor is a transferrin receptor.

[0100] Isolated antibody: An “isolated antibody”, as used herein, is intended to refer to an antibody that is substantially free of other antibodies having different antigenic specificities (e.g., an isolated antibody that specifically binds transferrin receptor is substantially free of antibodies that specifically bind antigens other than transferrin receptor). An isolated antibody that specifically binds transferrin receptor complex may, however, have cross-reactivity to other antigens, such as transferrin receptor molecules from other species. Moreover, an isolated antibody may be substantially free of other cellular material and/or (e.g., and) chemicals.

[0101] Kabat numbering: The terms “Kabat numbering”, “Kabat definitions and “Kabat labeling” are used interchangeably herein. These terms, which are recognized in the art, refer to a system of numbering amino acid residues which are more variable (i.e. hypervariable) than other amino acid residues in the heavy and light chain variable regions of an antibody, or an antigen binding portion thereof (Kabat et al. (1971) Ann. NY Acad. Sci. 190:382-391 and, Kabat, E. A., et al. (1991) Sequences of Proteins of Immunological Interest, Fifth Edition, U.S. Department of Health and Human Services, NIH Publication No. 91-3242). For the heavy chain variable region, the hypervariable region ranges from amino acid positions 31 to 35 for CDR1, amino acid positions 50 to 65 for CDR2, and amino acid positions 95 to 102 for CDR3. For the light chain variable region, the hypervariable region ranges from amino acid positions 24 to 34 for CDR1, amino acid positions 50 to 56 for CDR2, and amino acid positions 89 to 97 for CDR3.

[0102] Molecular payload: As used herein, the term “molecular payload” refers to a molecule or species that functions to modulate a biological outcome. In some embodiments, a molecular payload is linked to, or otherwise associated with a muscle-targeting agent. In some embodiments, the molecular payload is a small molecule, a protein, a peptide, a nucleic acid, or an oligonucleotide. In some embodiments, the molecular payload functions to modulate the transcription of a DNA sequence, to modulate the expression of a protein, or to modulate the activity of a protein. In some embodiments, the molecular payload is an oligonucleotide that comprises a strand having a region of complementarity to a target gene.

[0103] Muscle-targeting agent: As used herein, the term, “muscle-targeting agent,” refers to a molecule that specifically binds to an antigen expressed on muscle cells. The antigen in or on muscle cells may be a membrane protein, for example an integral membrane protein or a peripheral membrane protein. Typically, a muscle-targeting agent specifically binds to an antigen on muscle cells that facilitates internalization of the muscle-targeting agent (and any associated molecular payload) into the muscle cells. In some embodiments, a muscle-targeting agent specifically binds to an internalizing, cell surface receptor on muscles and is capable of being internalized into muscle cells through receptor mediated internalization. In some embodiments, the muscle-targeting agent is a small molecule, a protein, a peptide, a nucleic acid (e.g., an aptamer), or an antibody. In some embodiments, the muscle-targeting agent is linked to a molecular payload.

[0104] Muscle-targeting antibody: As used herein, the term, “muscle-targeting antibody,” refers to a muscle-targeting agent that is an antibody that specifically binds to an antigen found in or on muscle cells. In some embodiments, a muscle-targeting antibody specifically binds to an antigen on muscle cells that facilitates internalization of the muscle-targeting antibody (and any associated molecular payment) into the muscle cells. In some embodiments, the muscle-targeting antibody specifically binds to an internalizing, cell surface receptor present on muscle cells. In some embodiments, the muscle-targeting antibody is an antibody that specifically binds to a transferrin receptor.

[0105] Oligonucleotide: As used herein, the term “oligonucleotide” refers to an oligomeric nucleic acid compound of up to 200 nucleotides in length. Examples of oligonucleotides include, but are not limited to, RNAi oligonucleotides (e.g., siRNAs, shRNAs), microRNAs, gapmers, mixmers, phosphorodiamidate morpholinos, peptide nucleic acids, aptamers, guide nucleic acids (e.g., Cas9 guide RNAs), etc. Oligonucleotides may be single-stranded or double-stranded. In some embodiments, an oligonucleotide may comprise one or more modified nucleosides (e.g., 2′-O-methyl sugar modifications, purine or pyrimidine modifications). In some embodiments, an oligonucleotide may comprise one or more modified internucleoside linkages. In some embodiments, an oligonucleotide may comprise one or more phosphorothioate linkages, which may be in the Rp or Sp stereochemical conformation.

[0106] Recombinant antibody: The term “recombinant human antibody”, as used herein, is intended to include all human antibodies that are prepared, expressed, created or isolated by recombinant means, such as antibodies expressed using a recombinant expression vector transfected into a host cell (described in more details in this disclosure), antibodies isolated from a recombinant, combinatorial human antibody library (Hoogenboom H. R., (1997) TIB Tech. 15:62-70; Azzazy H., and Highsmith W. E., (2002) Clin. Biochem. 35:425-445; Gavilondo J. V., and Larrick J. W. (2002) BioTechniques 29:128-145; Hoogenboom H., and Chames P. (2000) Immunology Today 21:371-378), antibodies isolated from an animal (e.g., a mouse) that is transgenic for human immunoglobulin genes (see e.g., Taylor, L. D., et al. (1992) Nucl. Acids Res. 20:6287-6295; Kellermann S-A., and Green L. L. (2002) Current Opinion in Biotechnology 13:593-597; Little M. et al (2000) Immunology Today 21:364-370) or antibodies prepared, expressed, created or isolated by any other means that involves splicing of human immunoglobulin gene sequences to other DNA sequences. Such recombinant human antibodies have variable and constant regions derived from human germline immunoglobulin sequences. In certain embodiments, however, such recombinant human antibodies are subjected to in vitro mutagenesis (or, when an animal transgenic for human Ig sequences is used, in vivo somatic mutagenesis) and thus the amino acid sequences of the VH and VL regions of the recombinant antibodies are sequences that, while derived from and related to human germline VH and VL sequences, may not naturally exist within the human antibody germline repertoire in vivo. One embodiment of the disclosure provides fully human antibodies capable of binding human transferrin receptor which can be generated using techniques well known in the art, such as, but not limited to, using human Ig phage libraries such as those disclosed in Jermutus et al., PCT publication No. WO 2005/007699 A2.

[0107] Region of complementarity: As used herein, the term “region of complementarity” refers to a nucleotide sequence, e.g., of an oligonucleotide, that is sufficiently complementary to a cognate nucleotide sequence, e.g., of a target nucleic acid, such that the two nucleotide sequences are capable of annealing to one another under physiological conditions (e.g., in a cell). In some embodiments, a region of complementarity is fully complementary to a cognate nucleotide sequence of target nucleic acid. However, in some embodiments, a region of complementarity is partially complementary to a cognate nucleotide sequence of target nucleic acid (e.g., at least 80%, 90%, 95% or 99% complementarity). In some embodiments, a region of complementarity contains 1, 2, 3, or 4 mismatches compared with a cognate nucleotide sequence of a target nucleic acid.

[0108] Specifically binds: As used herein, the term “specifically binds” refers to the ability of a molecule to bind to a binding partner with a degree of affinity or avidity that enables the molecule to be used to distinguish the binding partner from an appropriate control in a binding assay or other binding context. With respect to an antibody, the term, “specifically binds”, refers to the ability of the antibody to bind to a specific antigen with a degree of affinity or avidity, compared with an appropriate reference antigen or antigens, that enables the antibody to be used to distinguish the specific antigen from others, e.g., to an extent that permits preferential targeting to certain cells, e.g., muscle cells, through binding to the antigen, as described herein. In some embodiments, an antibody specifically binds to a target if the antibody has a K_{D} for binding the target of at least about 10⁻⁴ M, 10⁻⁵ M, 10⁻⁶ M, 10⁻⁷ M, 10⁻⁸ M, 10⁻⁹ M, 10⁻¹⁰ M, 10⁻¹¹ M, 10⁻¹² M, 10⁻¹³ M, or less. In some embodiments, an antibody specifically binds to the transferrin receptor, e.g., an epitope of the apical domain of transferrin receptor.

[0109] Splice acceptor site: As used herein, the term “splice acceptor site” or “splice acceptor” refers to a nucleic acid sequence motif at the 3′ end of an intron or across an intron/exon junction of a gene or pre-mRNA that is involved in splicing of pre-mRNA into mRNA (i.e., removing introns from the pre-mRNA), and can be referred to as a splicing feature. A splice acceptor site includes a terminal AG sequence at the 3′ end of an intron, which is typically preceded (5′-ward) by a region high in pyrimidines (C/U). Upstream from the splice acceptor site is the branch point. Formation of a lariat loop intermediate structure by a transesterification reaction between the branch point and the splice donor site releases a 3′-OH of the 5′ exon, which subsequently reacts with the first nucleotide of the 3′ exon, thereby joining the exons and releasing the intron lariat. The AG sequence at the 3′ end of the intron in the splice acceptor site is known to be critical for proper splicing, as changing one of these nucleotides results in inhibition of splicing. Rarely, alternative splice acceptor sites have an AC at the 3′ end of the intron, instead of the more common AG. A common splice acceptor site motif has a sequence of or similar to [Y-rich region]-NCAGG or YₓNYAGG, in which Y represents a pyrimidine, N represents any nucleotide, and x is a number from 4 to 20. The cut site follows the AG, which represent the 3′-terminal nucleotides of the excised intron.

[0110] Splice donor site: As used herein, the term “splice donor site” or “splice donor” refers to a nucleic acid sequence motif at the 5′ end of an intron or across an exon/intron junction of a gene or pre-mRNA that is involved in splicing of pre-mRNA into mRNA (i.e., removing introns from the pre-mRNA), and can be referred to as a splicing feature. A splice donor site includes a terminal GU sequence at the 5′ end of the intron, within a larger and fairly unconstrained sequence. During splicing, the 2′-OH of a nucleotide within the branch point initiates a transesterification reaction via a nucleophilic attack on the 5′ G of the intron within the splice donor site. The G is thereby cleaved from the pre-mRNA and bonds instead to the branch point nucleotide, forming a loop lariat structure. The 3′ nucleotide of the upstream exon subsequently binds the splice acceptor site, joining the exons and excising the intron. A typical splice donor site has a sequence of or similar to GGGURAGU or AGGURNG, in which R represents a purine and N represents any nucleotide. The cut site precedes the first GU (i.e., GG/GURAGU or AG/GURNG), which represent the 5′-terminal nucleotides of the excised intron.

[0111] Subject: As used herein, the term “subject” refers to a mammal. In some embodiments, a subject is non-human primate, or rodent. In some embodiments, a subject is a human. In some embodiments, a subject is a patient, e.g., a human patient that has or is suspected of having a disease. In some embodiments, the subject is a human patient who has or is suspected of having a disease resulting from a mutated DMD gene sequence, e.g., a mutation in an exon of a DMD gene sequence. In some embodiments, a subject has a dystrophinopathy, e.g., Duchenne muscular dystrophy. In some embodiments, a subject is a patient that has a mutation of the DMD gene that is amenable to exon 55 skipping.

[0112] Transferrin receptor: As used herein, the term, “transferrin receptor” (also known as TFRC, CD71, p90, or TFR1) refers to an internalizing cell surface receptor that binds transferrin to facilitate iron uptake by endocytosis. In some embodiments, a transferrin receptor may be of human (NCBI Gene ID 7037), non-human primate (e.g., NCBI Gene ID 711568 or NCBI Gene ID 102136007), or rodent (e.g., NCBI Gene ID 22042) origin. In addition, multiple human transcript variants have been characterized that encoded different isoforms of the receptor (e.g., as annotated under GenBank RefSeq Accession Numbers: NP_001121620.1, NP_003225.2, NP_001300894.1, and NP_001300895.1).

[0113] 2′-modified nucleoside: As used herein, the terms “2′-modified nucleoside” and “2′-modified ribonucleoside” are used interchangeably and refer to a nucleoside having a sugar moiety modified at the 2′ position. In some embodiments, the 2′-modified nucleoside is a 2′-4′ bicyclic nucleoside, where the 2′ and 4′ positions of the sugar are bridged (e.g., via a methylene, an ethylene, or a (S)-constrained ethyl bridge). In some embodiments, the 2′-modified nucleoside is a non-bicyclic 2′-modified nucleoside, e.g., where the 2′ position of the sugar moiety is substituted. Non-limiting examples of 2′-modified nucleosides include: 2′-deoxy, 2′-fluoro (2′-F), 2′-O-methyl (2′-O-Me), 2′-O-methoxyethyl (2′-MOE), 2′-O-aminopropyl (2′-O-AP), 2′-O-dimethylaminoethyl (2′-O-DMAOE), 2′-O-dimethylaminopropyl (2′-O-DMAP), 2′-0-dimethylaminoethyloxyethyl (2′-O-DMAEOE), 2′-O—N-methylacetamido (2′-O-NMA), locked nucleic acid (LNA, methylene-bridged nucleic acid), ethylene-bridged nucleic acid (ENA), and (S)-constrained ethyl-bridged nucleic acid (cEt). In some embodiments, the 2′-modified nucleosides described herein are high-affinity modified nucleosides and oligonucleotides comprising the 2′-modified nucleosides have increased affinity to a target sequences, relative to an unmodified oligonucleotide. Examples of structures of 2′-modified nucleosides are provided below:

[chemical structure]

These examples are shown with phosphate groups, but any internucleoside linkages are contemplated between 2′-modified nucleosides.

### II. Complexes

[0114] Provided herein are complexes that comprise a targeting agent, e.g. an antibody, covalently linked to a molecular payload. In some embodiments, a complex comprises a muscle-targeting antibody covalently linked to an oligonucleotide. A complex may comprise an antibody that specifically binds a single antigenic site or that binds to at least two antigenic sites that may exist on the same or different antigens.

[0115] A complex may be used to modulate the activity or function of at least one gene, protein, and/or (e.g., and) nucleic acid. In some embodiments, the molecular payload present within a complex is responsible for the modulation of a gene, protein, and/or (e.g., and) nucleic acids. A molecular payload may be a small molecule, protein, nucleic acid, oligonucleotide, or any molecular entity capable of modulating the activity or function of a gene, protein, and/or (e.g., and) nucleic acid in a cell.

[0116] In some embodiments, a complex comprises a muscle-targeting agent, e.g., an anti-transferrin receptor antibody, covalently linked to a molecular payload, e.g., an antisense oligonucleotide that targets DMD to promote exon skipping, e.g., in a transcript encoded from a mutated DMD allele. In some embodiments, the complex targets a DMD pre-mRNA to promote skipping of exon 55 in the DMD pre-mRNA.

### A. Muscle-Targeting Agents

[0117] Some aspects of the disclosure provide muscle-targeting agents, e.g., for delivering a molecular payload to a muscle cell. In some embodiments, such muscle-targeting agents are capable of binding to a muscle cell, e.g., via specifically binding to an antigen on the muscle cell, and delivering an associated molecular payload to the muscle cell. In some embodiments, the molecular payload is bound (e.g., covalently bound) to the muscle targeting agent and is internalized into the muscle cell upon binding of the muscle targeting agent to an antigen on the muscle cell, e.g., via endocytosis. It should be appreciated that various types of muscle-targeting agents may be used in accordance with the disclosure, and that any muscle targets (e.g., muscle surface proteins) can be targeted by any type of muscle-targeting agent described herein. For example, the muscle-targeting agent may comprise, or consist of, a small molecule, a nucleic acid (e.g., DNA or RNA), a peptide (e.g., an antibody), a lipid (e.g., a microvesicle), or a sugar moiety (e.g., a polysaccharide). Exemplary muscle-targeting agents are described in further detail herein, however, it should be appreciated that the exemplary muscle-targeting agents provided herein are not meant to be limiting.

[0118] Some aspects of the disclosure provide muscle-targeting agents that specifically bind to an antigen on muscle, such as skeletal muscle, smooth muscle, or cardiac muscle. In some embodiments, any of the muscle-targeting agents provided herein bind to (e.g., specifically bind to) an antigen on a skeletal muscle cell, a smooth muscle cell, and/or (e.g., and) a cardiac muscle cell.

[0119] By interacting with muscle-specific cell surface recognition elements (e.g., cell membrane proteins), both tissue localization and selective uptake into muscle cells can be achieved. In some embodiments, molecules that are substrates for muscle uptake transporters are useful for delivering a molecular payload into muscle tissue. Binding to muscle surface recognition elements followed by endocytosis can allow even large molecules such as antibodies to enter muscle cells. As another example molecular payloads conjugated to transferrin or anti-TfR1 antibodies can be taken up by muscle cells via binding to transferrin receptor, which may then be endocytosed, e.g., via clathrin-mediated endocytosis.

[0120] The use of muscle-targeting agents may be useful for concentrating a molecular payload (e.g., oligonucleotide) in muscle while reducing toxicity associated with effects in other tissues. In some embodiments, the muscle-targeting agent concentrates a bound molecular payload in muscle cells as compared to another cell type within a subject. In some embodiments, the muscle-targeting agent concentrates a bound molecular payload in muscle cells (e.g., skeletal, smooth, or cardiac muscle cells) in an amount that is at least 1, 2, 3, 4, 5, 6, 7, 8, 9, 10, 15, 20, 30, 40, 50, 60, 70, 80, 90, or 100 times greater than an amount in non-muscle cells (e.g., liver, neuronal, blood, or fat cells). In some embodiments, a toxicity of the molecular payload in a subject is reduced by at least 1%, 2%, 3%, 4%, 5%, 10%, 15%, 20%, 25%, 30%, 35%, 40%, 45%, 50%, 55%, 60%, 65%, 70%, 75%, 80%, 90%, or 95% when it is delivered to the subject when bound to the muscle-targeting agent.

[0121] In some embodiments, to achieve muscle selectivity, a muscle recognition element (e.g., a muscle cell antigen) may be required. As one example, a muscle-targeting agent may be a small molecule that is a substrate for a muscle-specific uptake transporter. As another example, a muscle-targeting agent may be an antibody that enters a muscle cell via transporter-mediated endocytosis. As another example, a muscle targeting agent may be a ligand that binds to cell surface receptor on a muscle cell. It should be appreciated that while transporter-based approaches provide a direct path for cellular entry, receptor-based targeting may involve stimulated endocytosis to reach the desired site of action.

i. Muscle-Targeting Antibodies

[0122] In some embodiments, the muscle-targeting agent is an antibody. Generally, the high specificity of antibodies for their target antigen provides the potential for selectively targeting muscle cells (e.g., skeletal, smooth, and/or (e.g., and) cardiac muscle cells). This specificity may also limit off-target toxicity. Examples of antibodies that are capable of targeting a surface antigen of muscle cells have been reported and are within the scope of the disclosure. For example, antibodies that target the surface of muscle cells are described in Arahata K., et al. “Immunostaining of skeletal and cardiac muscle surface membrane with antibody against Duchenne muscular dystrophy peptide” Nature 1988; 333: 861-3; Song K. S., et al. “Expression of caveolin-3 in skeletal, cardiac, and smooth muscle cells. Caveolin-3 is a component of the sarcolemma and co-fractionates with dystrophin and dystrophin-associated glycoproteins” J Biol Chem 1996; 271: 15160-5; and Weisbart R. H. et al., “Cell type specific targeted intracellular delivery into muscle of a monoclonal antibody that binds myosin IIb” Mol Immunol. 2003 March, 39(13):78309; the entire contents of each of which are incorporated herein by reference.

a. Anti-Transferrin Receptor (TfR) Antibodies

[0123] Some aspects of the disclosure are based on the recognition that agents binding to transferrin receptor, e.g., anti-transferrin-receptor antibodies, are capable of targeting muscle cell. Transferrin receptors are internalizing cell surface receptors that transport transferrin across the cellular membrane and participate in the regulation and homeostasis of intracellular iron levels. Some aspects of the disclosure provide transferrin receptor binding proteins, which are capable of binding to transferrin receptor. Accordingly, aspects of the disclosure provide binding proteins (e.g., antibodies) that bind to transferrin receptor. In some embodiments, binding proteins that bind to transferrin receptor are internalized, along with any bound molecular payload, into a muscle cell. As used herein, an antibody that binds to a transferrin receptor may be referred to interchangeably as an, transferrin receptor antibody, an anti-transferrin receptor antibody, or an anti-TfR1 antibody. Antibodies that bind, e.g. specifically bind, to a transferrin receptor may be internalized into the cell, e.g. through receptor-mediated endocytosis, upon binding to a transferrin receptor.

[0124] It should be appreciated that anti-TfR1 antibodies may be produced, synthesized, and/or (e.g., and) derivatized using several known methodologies, e.g. library design using phage display. Exemplary methodologies have been characterized in the art and are incorporated by reference (Diez, P. et al. “High-throughput phage-display screening in array format”, Enzyme and microbial technology, 2015, 79, 34-41.; Christoph M. H. and Stanley, J. R. “Antibody Phage Display: Technique and Applications” J Invest Dermatol. 2014, 134:2.; Engleman, Edgar (Ed.) “Human Hybridomas and Monoclonal Antibodies.” 1985, Springer.). In other embodiments, an anti-TfR1 antibody has been previously characterized or disclosed. Antibodies that specifically bind to transferrin receptor are known in the art (see, e.g. U.S. Pat. No. 4,364,934, filed Dec. 4, 1979, “Monoclonal antibody to a human early thymocyte antigen and methods for preparing same”; U.S. Pat. No. 8,409,573, filed Jun. 14, 2006, “Anti-CD71 monoclonal antibodies and uses thereof for treating malignant tumor cells”; U.S. Pat. No. 9,708,406, filed May 20, 2014, “Anti-transferrin receptor antibodies and methods of use”; U.S. Pat. No. 9,611,323, filed Dec. 19, 2014, “Low affinity blood brain barrier receptor antibodies and uses therefor”; WO 2015/098989, filed Dec. 24, 2014, “Novel anti-Transferrin receptor antibody that passes through blood-brain barrier”; Schneider C. et al. “Structural features of the cell surface receptor for transferrin that is recognized by the monoclonal antibody OKT9.” J Biol Chem. 1982, 257:14, 8516-8522.; Lee et al. “Targeting Rat Anti-Mouse Transferrin Receptor Monoclonal Antibodies through Blood-Brain Barrier in Mouse” 2000, J Pharmacol. Exp. Ther., 292: 1048-1052.).

[0125] In some embodiments, the anti-TfR1 antibody described herein binds to transferrin receptor with high specificity and affinity. In some embodiments, the anti-TfR1 antibody described herein specifically binds to any extracellular epitope of a transferrin receptor or an epitope that becomes exposed to an antibody. In some embodiments, anti-TfR1 antibodies provided herein bind specifically to transferrin receptor from human, non-human primates, mouse, rat, etc. In some embodiments, anti-TfR1 antibodies provided herein bind to human transferrin receptor. In some embodiments, the anti-TfR1 antibody described herein binds to an amino acid segment of a human or non-human primate transferrin receptor, as provided in SEQ ID NOs: 105-108. In some embodiments, the anti-TfR1 antibody described herein binds to an amino acid segment corresponding to amino acids 90-96 of a human transferrin receptor as set forth in SEQ ID NO: 105, which is not in the apical domain of the transferrin receptor.

[0126] In some embodiments, the anti-TfR1 antibodies described herein (e.g., Anti-TfR clone 8 in Table 2 below) bind an epitope in TfR1, wherein the epitope comprises residues in amino acids 214-241 and/or amino acids 354-381 of SEQ ID NO: 105. In some embodiments, the anti-TfR1 antibodies described herein bind an epitope comprising residues in amino acids 214-241 and amino acids 354-381 of SEQ ID NO: 105. In some embodiments, the anti-TfR1 antibodies described herein bind an epitope comprising one or more of residues Y222, T227, K231, H234, T367, S368, S370, T376, and S378 of human TfR1 as set forth in SEQ ID NO: 105. In some embodiments, the anti-TfR1 antibodies described herein bind an epitope comprising residues Y222, T227, K231, H234, T367, S368, S370, T376, and S378 of human TfR1 as set forth in SEQ ID NO: 105.

[0127] In some embodiments, the anti-TfR1 antibody described herein (e.g., 3M12 in Table 2 below and its variants) bind an epitope in TfR1, wherein the epitope comprises residues in amino acids 258-291 and/or amino acids 358-381 of SEQ ID NO: 105. In some embodiments, the anti-TfR1 antibodies (e.g., 3M12 in Table 2 below and its variants) described herein bind an epitope comprising residues in amino acids amino acids 258-291 and amino acids 358-381 of SEQ ID NO: 105. In some embodiments, the anti-TfR1 antibodies described herein (e.g., 3M12 in Table 2 below and its variants) bind an epitope comprising one or more of residues K261, S273, Y282, T362, S368, S370, and K371 of human TfR1 as set forth in SEQ ID NO: 105. In some embodiments, the anti-TfR1 antibodies described herein (e.g., 3M12 in Table 2 below and its variants) bind an epitope comprising residues K261, S273, Y282, T362, S368, S370, and K371 of human TfR1 as set forth in SEQ ID NO: 105.

[0128] An example human transferrin receptor amino acid sequence, corresponding to NCBI sequence NP_003225.2 (transferrin receptor protein 1 isoform 1, Homo sapiens) is as follows:

(SEQ ID NO: 105)
MMDQARSAFSNLFGGEPLSYTRFSLARQVDGDNSHVEMKLAVDEEENAD
NNTKANVTKPKRCSGSICYGTIAVIVFFLIGFMIGYLGYCKGVEPKTEC
ERLAGTESPVREEPGEDFPAARRLYWDDLKRKLSEKLDSTDFTGTIKLL
NENSYVPREAGSQKDENLALYVENQFREFKLSKVWRDQHFVKIQVKDSA
QNSVIIVDKNGRLVYLVENPGGYVAYSKAATVTGKLVHANFGTKKDFED
LYTPVNGSIVIVRAGKITFAEKVANAESLNAIGVLIYMDQTKFPIVNAE
LSFFGHAHLGTGDPYTPGFPSFNHTQFPPSRSSGLPNIPVQTISRAAAE
KLFGNMEGDCPSDWKTDSTCRMVTSESKNVKLTVSNVLKEIKILNIFGV
IKGFVEPDHYVVVGAQRDAWGPGAAKSGVGTALLLKLAQMFSDMVLKDG
FQPSRSIIFASWSAGDFGSVGATEWLEGYLSSLHLKAFTYINLDKAVLG
TSNFKVSASPLLYTLIEKTMQNVKHPVTGQFLYQDSNWASKVEKLTLDN
AAFPFLAYSGIPAVSFCFCEDTDYPYLGTTMDTYKELIERIPELNKVAR
AAAEVAGQFVIKLTHDVELNLDYERYNSQLLSFVRDLNQYRADIKEMGL
SLQWLYSARGDFFRATSRLTTDFGNAEKTDRFVMKKLNDRVMRVEYHFL
SPYVSPKESPFRHVFWGSGSHTLPALLENLKLRKQNNGAFNETLFRNQL
ALATWTIQGAANALSGDVWDIDNEF.

[0129] An example non-human primate transferrin receptor amino acid sequence, corresponding to NCBI sequence NP_001244232.1(transferrin receptor protein 1, Macaca mulatta) is as follows:

(SEQ ID NO: 106)
MMDQARSAFSNLFGGEPLSYTRFSLARQVDGDNSHVEMKLGVDEEENTD
NNTKPNGTKPKRCGGNICYGTIAVIIFFLIGFMIGYLGYCKGVEPKTEC
ERLAGTESPAREEPEEDFPAAPRLYWDDLKRKLSEKLDTTDFTSTIKLL
NENLYVPREAGSQKDENLALYIENQFREFKLSKVWRDQHFVKIQVKDSA
QNSVIIVDKNGGLVYLVENPGGYVAYSKAATVTGKLVHANFGTKKDFED
LDSPVNGSIVIVRAGKITFAEKVANAESLNAIGVLIYMDQTKFPIVKAD
LSFFGHAHLGTGDPYTPGFPSFNHTQFPPSQSSGLPNIPVQTISRAAAE
KLFGNMEGDCPSDWKTDSTCKMVTSENKSVKLTVSNVLKETKILNIFGV
IKGFVEPDHYVVVGAQRDAWGPGAAKSSVGTALLLKLAQMFSDMVLKDG
FQPSRSIIFASWSAGDFGSVGATEWLEGYLSSLHLKAFTYINLDKAVLG
TSNFKVSASPLLYTLIEKTMQDVKHPVTGRSLYQDSNWASKVEKLTLDN
AAFPFLAYSGIPAVSFCFCEDTDYPYLGTTMDTYKELVERIPELNKVAR
AAAEVAGQFVIKLTHDTELNLDYERYNSQLLLFLRDLNQYRADVKEMGL
SLQWLYSARGDFFRATSRLTTDFRNAEKRDKFVMKKLNDRVMRVEYYFL
SPYVSPKESPFRHVFWGSGSHTLSALLESLKLRRQNNSAFNETLFRNQL
ALATWTIQGAANALSGDVWDIDNEF

[0130] An example non-human primate transferrin receptor amino acid sequence, corresponding to NCBI sequence XP_005545315.1 (transferrin receptor protein 1, Macaca fascicularis) is as follows:

(SEQ ID NO: 107)
MMDQARSAFSNLFGGEPLSYTRFSLARQVDGDNSHVEMKLGVDEEENTDN
NTKANGTKPKRCGGNICYGTIAVIIFFLIGFMIGYLGYCKGVEPKTECER
LAGTESPAREEPEEDFPAAPRLYWDDLKRKLSEKLDTTDFTSTIKLLNEN
LYVPREAGSQKDENLALYIENQFREFKLSKVWRDQHFVKIQVKDSAQNSV
IIVDKNGGLVYLVENPGGYVAYSKAATVTGKLVHANFGTKKDFEDLDSPV
NGSIVIVRAGKITFAEKVANAESLNAIGVLIYMDQTKFPIVKADLSFFGH
AHLGTGDPYTPGFPSFNHTQFPPSQSSGLPNIPVQTISRAAAEKLFGNME
GDCPSDWKTDSTCKMVTSENKSVKLTVSNVLKETKILNIFGVIKGFVEPD
HYVVVGAQRDAWGPGAAKSSVGTALLLKLAQMFSDMVLKDGFQPSRSIIF
ASWSAGDFGSVGATEWLEGYLSSLHLKAFTYINLDKAVLGTSNFKVSASP
LLYTLIEKTMQDVKHPVTGRSLYQDSNWASKVEKLTLDNAAFPFLAYSGI
PAVSFCFCEDTDYPYLGTTMDTYKELVERIPELNKVARAAAEVAGQFVIK
LTHDTELNLDYERYNSQLLLFLRDLNQYRADVKEMGLSLQWLYSARGDFF
RATSRLTTDFRNAEKRDKFVMKKLNDRVMRVEYYFLSPYVSPKESPFRHV
FWGSGSHTLSALLESLKLRRQNNSAFNETLFRNQLALATWTIQGAANALS
GDVWDIDNEF.

[0131] An example mouse transferrin receptor amino acid sequence, corresponding to NCBI sequence NP_001344227.1 (transferrin receptor protein 1, Mus musculus) is as follows:

(SEQ ID NO: 108)
MMDQARSAFSNLFGGEPLSYTRFSLARQVDGDNSHVEMKLAADEEENADN
NMKASVRKPKRFNGRLCFAAIALVIFFLIGFMSGYLGYCKRVEQKEECVK
LAETEETDKSETMETEDVPTSSRLYWADLKTLLSEKLNSIEFADTIKQLS
QNTYTPREAGSQKDESLAYYIENQFHEFKFSKVWRDEHYVKIQVKSSIGQ
NMVTIVQSNGNLDPVESPEGYVAFSKPTEVSGKLVHANFGTKKDFEELSY
SVNGSLVIVRAGEITFAEKVANAQSFNAIGVLIYMDKNKFPVVEADLALF
GHAHLGTGDPYTPGFPSFNHTQFPPSQSSGLPNIPVQTISRAAAEKLFGK
MEGSCPARWNIDSSCKLELSQNQNVKLIVKNVLKERRILNIFGVIKGYEE
PDRYVVVGAQRDALGAGVAAKSSVGTGLLLKLAQVFSDMISKDGFRPSRS
IIFASWTAGDFGAVGATEWLEGYLSSLHLKAFTYINLDKVVLGTSNFKVS
ASPLLYTLMGKIMQDVKHPVDGKSLYRDSNWISKVEKLSFDNAAYPFLAY
SGIPAVSFCFCEDADYPYLGTRLDTYEALTQKVPQLNQMVRTAAEVAGQL
IIKLTHDVELNLDYEMYNSKLLSFMKDLNQFKTDIRDMGLSLQWLYSARG
DYFRATSRLTTDFHNAEKTNRFVMREINDRIMKVEYHFLSPYVSPRESPF
RHIFWGSGSHTLSALVENLKLRQKNITAFNETLFRNQLALATWTIQGVAN
ALSGDIWNIDNEF

[0132] In some embodiments, an anti-TfR1 antibody binds to an amino acid segment of the receptor as follows: FVKIQVKDSAQNSVIIVDKNGRLVYLVENPGGYVAYSKAATVTGKLVHANFGTKKDFE DLYTPVNGSIVIVRAGKITFAEKVANAESLNAIGVLIYMDQTKFPIVNAELSFFGHAHLG TGDPYTPGFPSFNHTQFPPSRSSGLPNIPVQTISRAAAEKLFGNMEGDCPSDWKTDSTCR MVTSESKNVKLTVSNVLKE (SEQ ID NO: 109) and does not inhibit the binding interactions between transferrin receptors and transferrin and/or (e.g., and) human hemochromatosis protein (also known as HFE). In some embodiments, the anti-TfR1 antibody described herein does not bind an epitope in SEQ ID NO: 109.

[0133] Appropriate methodologies may be used to obtain and/or (e.g., and) produce antibodies, antibody fragments, or antigen-binding agents, e.g., through the use of recombinant DNA protocols. In some embodiments, an antibody may also be produced through the generation of hybridomas (see, e.g., Kohler, G and Milstein, C. “Continuous cultures of fused cells secreting antibody of predefined specificity” Nature, 1975, 256: 495-497). The antigen-of-interest may be used as the immunogen in any form or entity, e.g., recombinant or a naturally occurring form or entity. Hybridomas are screened using standard methods, e.g. ELISA screening, to find at least one hybridoma that produces an antibody that targets a particular antigen. Antibodies may also be produced through screening of protein expression libraries that express antibodies, e.g., phage display libraries. Phage display library design may also be used, in some embodiments, (see, e.g. U.S. Pat. No. 5,223,409, filed Mar. 1, 1991, “Directed evolution of novel binding proteins”; WO 1992/18619, filed Apr. 10, 1992, “Heterodimeric receptor libraries using phagemids”; WO 1991/17271, filed May 1, 1991, “Recombinant library screening methods”; WO 1992/20791, filed May 15, 1992, “Methods for producing members of specific binding pairs”; WO 1992/15679, filed Feb. 28, 1992, and “Improved epitope displaying phage”). In some embodiments, an antigen-of-interest may be used to immunize a non-human animal, e.g., a rodent or a goat. In some embodiments, an antibody is then obtained from the non-human animal, and may be optionally modified using a number of methodologies, e.g., using recombinant DNA techniques. Additional examples of antibody production and methodologies are known in the art (see, e.g. Harlow et al. “Antibodies: A Laboratory Manual”, Cold Spring Harbor Laboratory, 1988.).

[0134] In some embodiments, an antibody is modified, e.g., modified via glycosylation, phosphorylation, sumoylation, and/or (e.g., and) methylation. In some embodiments, an antibody is a glycosylated antibody, which is conjugated to one or more sugar or carbohydrate molecules. In some embodiments, the one or more sugar or carbohydrate molecule are conjugated to the antibody via N-glycosylation, O-glycosylation, C-glycosylation, glypiation (GPI anchor attachment), and/or (e.g., and) phosphoglycosylation. In some embodiments, the one or more sugar or carbohydrate molecules are monosaccharides, disaccharides, oligosaccharides, or glycans. In some embodiments, the one or more sugar or carbohydrate molecule is a branched oligosaccharide or a branched glycan. In some embodiments, the one or more sugar or carbohydrate molecule includes a mannose unit, a glucose unit, an N-acetylglucosamine unit, an N-acetylgalactosamine unit, a galactose unit, a fucose unit, or a phospholipid unit. In some embodiments, there are about 1-10, about 1-5, about 5-10, about 1-4, about 1-3, or about 2 sugar molecules. In some embodiments, a glycosylated antibody is fully or partially glycosylated. In some embodiments, an antibody is glycosylated by chemical reactions or by enzymatic means. In some embodiments, an antibody is glycosylated in vitro or inside a cell, which may optionally be deficient in an enzyme in the N- or O-glycosylation pathway, e.g. a glycosyltransferase. In some embodiments, an antibody is functionalized with sugar or carbohydrate molecules as described in International Patent Application Publication WO2014065661, published on May 1, 2014, entitled, “Modified antibody, antibody-conjugate and process for the preparation thereof”.

[0135] In some embodiments, the anti-TfR1 antibody of the present disclosure comprises a VL domain and/or (e.g., and) a VH domain of any one of the anti-TfR1 antibodies selected from any one of Tables 2-7, and comprises a constant region comprising the amino acid sequences of the constant regions of an IgG, IgE, IgM, IgD, IgA or IgY immunoglobulin molecule, any class (e.g., IgG1, IgG2, IgG3, IgG4, IgA1 and IgA2), or any subclass (e.g., IgG2a and IgG2b) of immunoglobulin molecule. Non-limiting examples of human constant regions are described in the art, e.g., see Kabat E A et al., (1991) supra.

[0136] In some embodiments, agents binding to transferrin receptor, e.g., anti-TfR1 antibodies, are capable of targeting muscle cell and/or (e.g., and) mediate the transportation of an agent across the blood brain barrier. Transferrin receptors are internalizing cell surface receptors that transport transferrin across the cellular membrane and participate in the regulation and homeostasis of intracellular iron levels. Some aspects of the disclosure provide transferrin receptor binding proteins, which are capable of binding to transferrin receptor. Antibodies that bind, e.g. specifically bind, to a transferrin receptor may be internalized into the cell, e.g. through receptor-mediated endocytosis, upon binding to a transferrin receptor.

[0137] Provided herein, in some aspects, are humanized antibodies that bind to transferrin receptor with high specificity and affinity. In some embodiments, the humanized anti-TfR1 antibody described herein specifically binds to any extracellular epitope of a transferrin receptor or an epitope that becomes exposed to an antibody. In some embodiments, the humanized anti-TfR1 antibodies provided herein bind specifically to transferrin receptor from human, non-human primates, mouse, rat, etc. In some embodiments, the humanized anti-TfR1 antibodies provided herein bind to human transferrin receptor. In some embodiments, the humanized anti-TfR1 antibody described herein binds to an amino acid segment of a human or non-human primate transferrin receptor, as provided in SEQ ID NOs: 105-108. In some embodiments, the humanized anti-TfR1 antibody described herein binds to an amino acid segment corresponding to amino acids 90-96 of a human transferrin receptor as set forth in SEQ ID NO: 105, which is not in the apical domain of the transferrin receptor. In some embodiments, the humanized anti-TfR1 antibodies described herein binds to TfR1 but does not bind to TfR2.

[0138] In some embodiments, an anti-TFR1 antibody specifically binds a TfR1 (e.g., a human or non-human primate TfR1) with binding affinity (e.g., as indicated by Kd) of at least about 10⁻⁴ M, 10⁻⁵ M, 10⁻⁶ M, 10⁻⁷ M, 10⁻⁸ M, 10⁻⁹ M, 10⁻¹⁰ M, 10⁻¹¹ M, 10⁻¹² M, 10⁻¹³ M, or less. In some embodiments, the anti-TfR1 antibodies described herein bind to TfR1 with a KD of sub-nanomolar range. In some embodiments, the anti-TfR1 antibodies described herein selectively bind to transferrin receptor 1 (TfR1) but do not bind to transferrin receptor 2 (TfR2). In some embodiments, the anti-TfR1 antibodies described herein bind to human TfR1 and cyno TfR1 (e.g., with a Kd of 10⁻⁷ M, 10⁻⁸ M, 10⁻⁹ M, 10⁻¹⁰ M, 10⁻¹¹ M, 10⁻¹² M, 10⁻¹³ M, or less), but do not bind to a mouse TfR1. The affinity and binding kinetics of the anti-TfR1 antibody can be tested using any suitable method including but not limited to biosensor technology (e.g., OCTET or BIACORE). In some embodiments, binding of any one of the anti-TfR1 antibodies described herein does not complete with or inhibit transferrin binding to the TfR1. In some embodiments, binding of any one of the anti-TfR1 antibodies described herein does not complete with or inhibit HFE-beta-2-microglobulin binding to the TfR1.

[0139] Non-limiting examples of anti-TfR1 antibodies are provided in Table 2.

TABLE 2
Examples of Anti-TfR1 Antibodies

| | No. | | | |
|---|---|---|---|---|
| Ab | system | IMGT | Kabat | Chothia |
| 3-A4 | CDR- | GFNIKDDY (SEQ ID NO: | DDYMY (SEQ ID NO: 7) | GFNIKDD (SEQ ID NO: 12) |
| | H1 | 1) | | |
| | CDR- | IDPENGDT (SEQ ID NO: | WIDPENGDTEYASKFQD | ENG (SEQ ID NO: 13) |
| | H2 | 2) | (SEQ ID NO: 8) | |
| | CDR- | TLWLRRGLDY (SEQ ID | WLRRGLDY (SEQ ID NO: 9) | LRRGLD (SEQ ID NO: 14) |
| | H3 | NO: 3) | | |
| | CDR- | KSLLHSNGYTY (SEQ ID | RSSKSLLHSNGYTYLF (SEQ | SKSLLHSNGYTY (SEQ ID |
| | L1 | NO: 4) | ID NO: 10) | NO: 15) |
| | CDR- | RMS (SEQ ID NO: 5) | RMSNLAS (SEQ ID NO: 11) | RMS (SEQ ID NO: 5) |
| | L2 | | | |
| | CDR- | MQHLEYPFT (SEQ ID | MQHLEYPFT (SEQ ID NO: 6) | HLEYPF (SEQ ID NO: 16) |
| | L3 | NO: 6) | | |
| | VH | EVQLQQSGAELVRPGASVKLSCTASGFNIKDDYMYWVKQRPEQGLEWIGWIDPENGDT | | |
| | | EYASKFQDKATVTADTSSNTAYLQLSSLTSEDTAVYYCTLWLRRGLDYWGQGTSVTVS | | |
| | | S (SEQ ID NO: 17) | | |
| | VL | DIVMTQAAPSVPVTPGESVSISCRSSKSLLHSNGYTYLFWFLQRPGQSPQLLIYRMSNLA | | |
| | | SGVPDRFSGSGSGTAFTLRISRVEAEDVGVYYCMQHLEYPFTFGGGTKLEIK (SEQ ID | | |
| | | NO: 18) | | |
| 3-A4 | CDR- | GFNIKDDY (SEQ ID NO: | DDYMY (SEQ ID NO: 7) | GFNIKDD (SEQ ID NO: 12) |
| N54T* | H1 | 1) | | |
| | CDR- | IDPETGDT (SEQ ID NO: | WIDPETGDTEYASKFQD | ETG (SEQ ID NO: 21) |
| | H2 | 19) | (SEQ ID NO: 20) | |
| | CDR- | TLWLRRGLDY (SEQ ID | WLRRGLDY (SEQ ID NO: 9) | LRRGLD (SEQ ID NO: 14) |
| | H3 | NO: 3) | | |
| | CDR- | KSLLHSNGYTY (SEQ ID | RSSKSLLHSNGYTYLF (SEQ | SKSLLHSNGYTY (SEQ ID |
| | L1 | NO: 4) | ID NO: 10) | NO: 15) |
| | CDR- | RMS (SEQ ID NO: 5) | RMSNLAS (SEQ ID NO: 11) | RMS(SEQ ID NO: 5) |
| | L2 | | | |
| | CDR- | MQHLEYPFT (SEQ ID | MQHLEYPFT (SEQ ID NO: 6) | HLEYPF (SEQ ID NO: 16) |
| | L3 | NO: 6) | | |
| | VH | EVQLQQSGAELVRPGASVKLSCTASGFNIKDDYMYWVKQRPEQGLEWIGWIDPETGDT | | |
| | | EYASKFQDKATVTADTSSNTAYLQLSSLTSEDTAVYYCTLWLRRGLDYWGQGTSVTVS | | |
| | | S (SEQ ID NO: 22) | | |
| | VL | DIVMTQAAPSVPVTPGESVSISCRSSKSLLHSNGYTYLFWFLQRPGQSPQLLIYRMSNLA | | |
| | | SGVPDRFSGSGSGTAFTLRISRVEAEDVGVYYCMQHLEYPFTFGGGTKLEIK (SEQ ID | | |
| | | NO: 18) | | |
| 3-A4 | CDR- | GFNIKDDY (SEQ ID NO: | DDYMY (SEQ ID NO: 7) | GFNIKDD (SEQ ID NO: 12) |
| N54S* | H1 | 1) | | |
| | CDR- | IDPESGDT (SEQ ID NO: | WIDPESGDTEYASKFQD | ESG (SEQ ID NO: 25) |
| | H2 | 23) | (SEQ ID NO: 24) | |
| | CDR- | TLWLRRGLDY (SEQ ID | WLRRGLDY (SEQ ID NO: 9) | LRRGLD (SEQ ID NO: 14) |
| | H3 | NO: 3) | | |
| | CDR- | KSLLHSNGYTY (SEQ ID | RSSKSLLHSNGYTYLF (SEQ | SKSLLHSNGYTY (SEQ ID |
| | L1 | NO: 4) | ID NO: 10) | NO: 15) |
| | CDR- | RMS (SEQ ID NO: 5) | RMSNLAS (SEQ ID NO: 11) | RMS (SEQ ID NO: 5) |
| | L2 | | | |
| | CDR- | MQHLEYPFT (SEQ ID | MQHLEYPFT (SEQ ID NO: 6) | HLEYPF (SEQ ID NO: 16) |
| | L3 | NO: 6) | | |
| | VH | EVQLQQSGAELVRPGASVKLSCTASGFNIKDDYMYWVKQRPEQGLEWIGWIDPESGDT | | |
| | | EYASKFQDKATVTADTSSNTAYLQLSSLTSEDTAVYYCTLWLRRGLDYWGQGTSVTVS | | |
| | | S (SEQ ID NO: 26) | | |
| | VL | DIVMTQAAPSVPVTPGESVSISCRSSKSLLHSNGYTYLFWFLQRPGQSPQLLIYRMSNLA | | |
| | | SGVPDRFSGSGSGTAFTLRISRVEAEDVGVYYCMQHLEYPFTFGGGTKLEIK (SEQ ID | | |
| | | NO: 18) | | |
| 3-M12 | CDR- | GYSITSGYY (SEQ ID | SGYYWN (SEQ ID NO: 33) | GYSITSGY (SEQ ID NO: |
| | H1 | NO: 27) | | 38) |
| | CDR- | ITFDGAN (SEQ ID NO: | YITFDGANNYNPSLKN (SEQ | FDG (SEQ ID NO: 39) |
| | H2 | 28) | ID NO: 34) | |
| | CDR- | TRSSYDYDVLDY (SEQ | SSYDYDVLDY (SEQ ID NO: | SYDYDVLD (SEQ ID NO: |
| | H3 | ID NO: 29) | 35) | 40) |
| | CDR- | QDISNF (SEQ ID NO: 30) | RASQDISNFLN (SEQ ID NO: | SQDISNF (SEQ ID NO: 41) |
| | L1 | | 36) | |
| | CDR- | YTS (SEQ ID NO: 31) | YTSRLHS (SEQ ID NO: 37) | YTS (SEQ ID NO: 31) |
| | L2 | | | |
| | CDR- | QQGHTLPYT (SEQ ID | QQGHTLPYT (SEQ ID NO: 32) | GHTLPY (SEQ ID NO: 42) |
| | L3 | NO: 32) | | |
| | VH | DVQLQESGPGLVKPSQSLSLTCSVTGYSITSGYYWNWIRQFPGNKLEWMGYITFDGAN | | |
| | | NYNPSLKNRISITRDTSKNQFFLKLTSVTTEDTATYYCTRSSYDYDVLDYWGQGTTLTV | | |
| | | SS (SEQ ID NO: 43) | | |
| | VL | DIQMTQTTSSLSASLGDRVTISCRASQDISNFLNWYQQRPDGTVKLLIYYTSRLHSGVPS | | |
| | | RFSGSGSGTDFSLTVSNLEQEDIATYFCQQGHTLPYTFGGGTKLEIK (SEQ ID NO: 44) | | |
| 5-H12 | CDR- | GYSFTDYC (SEQ ID NO: | DYCIN (SEQ ID NO: 51) | GYSFTDY (SEQ ID NO: 56) |
| | H1 | 45) | | |
| | CDR- | IYPGSGNT (SEQ ID NO: | WIYPGSGNTRYSERFKG | GSG (SEQ ID NO: 57) |
| | H2 | 46) | (SEQ ID NO: 52) | |
| | CDR- | AREDYYPYHGMDY | EDYYPYHGMDY (SEQ ID | DYYPYHGMD (SEQ ID |
| | H3 | (SEQ ID NO: 47) | NO: 53) | NO: 58) |
| | CDR- | ESVDGYDNSF (SEQ ID | RASESVDGYDNSFMH (SEQ | SESVDGYDNSF (SEQ ID |
| | L1 | NO: 48) | ID NO: 54) | NO: 59) |
| | CDR- | RAS (SEQ ID NO: 49) | RASNLES (SEQ ID NO: 55) | RAS (SEQ ID NO: 49) |
| | L2 | | | |
| | CDR- | QQSSEDPWT (SEQ ID | QQSSEDPWT (SEQ ID NO: 50) | SSEDPW (SEQ ID NO: 60) |
| | L3 | NO: 50) | | |
| | VH | QIQLQQSGPELVRPGASVKISCKASGYSFTDYCINWVNQRPGQGLEWIGWIYPGSGNTR | | |
| | | YSERFKGKATLTVDTSSNTAYMQLSSLTSEDSAVYFCAREDYYPYHGMDYWGQGTSV | | |
| | | TVSS (SEQ ID NO: 61) | | |
| | VL | DIVLTQSPTSLAVSLGQRATISCRASESVDGYDNSFMHWYQQKPGQPPKLLIFRASNLES | | |
| | | GIPARFSGSGSRTDFTLTINPVEAADVATYYCQQSSEDPWTFGGGTKLEIK (SEQ ID NO: | | |
| | | 62) | | |
| 5-H12 | CDR- | GYSFTDYY (SEQ ID | DYYIN (SEQ ID NO: 64) | GYSFTDY (SEQ ID NO: 56) |
| C33Y* | H1 | NO: 63) | | |
| | CDR- | IYPGSGNT (SEQ ID NO: | WIYPGSGNTRYSERFKG | GSG (SEQ ID NO: 57) |
| | H2 | 46) | (SEQ ID NO: 52) | |
| | CDR- | AREDYYPYHGMDY | EDYYPYHGMDY (SEQ ID | DYYPYHGMD (SEQ ID |
| | H3 | (SEQ ID NO: 47) | NO: 53) | NO: 58) |
| | CDR- | ESVDGYDNSF (SEQ ID | RASESVDGYDNSFMH (SEQ | SESVDGYDNSF (SEQ ID |
| | L1 | NO: 48) | ID NO: 54) | NO: 59) |
| | CDR- | RAS (SEQ ID NO: 49) | RASNLES (SEQ ID NO: 55) | RAS (SEQ ID NO: 49) |
| | L2 | | | |
| | CDR- | QQSSEDPWT (SEQ ID | QQSSEDPWT (SEQ ID NO: 50) | SSEDPW (SEQ ID NO: 60) |
| | L3 | NO: 50) | | |
| | VH | QIQLQQSGPELVRPGASVKISCKASGYSFTDYYINWVNQRPGQGLEWIGWIYPGSGNTR | | |
| | | YSERFKGKATLTVDTSSNTAYMQLSSLTSEDSAVYFCAREDYYPYHGMDYWGQGTSV | | |
| | | TVSS (SEQ ID NO: 65) | | |
| | VL | DIVLTQSPTSLAVSLGQRATISCRASESVDGYDNSFMHWYQQKPGQPPKLLIFRASNLES | | |
| | | GIPARFSGSGSRTDFTLTINPVEAADVATYYCQQSSEDPWTFGGGTKLEIK (SEQ ID NO: | | |
| | | 62) | | |
| 5-H12 | CDR- | GYSFTDYD (SEQ ID | DYDIN (SEQ ID NO: 67) | GYSFTDY (SEQ ID NO: 56) |
| C33D* | H1 | NO: 66) | | |
| | CDR- | IYPGSGNT (SEQ ID NO: | WIYPGSGNTRYSERFKG | GSG (SEQ ID NO: 57) |
| | H2 | 46) | (SEQ ID NO: 52) | |
| | CDR- | AREDYYPYHGMDY | EDYYPYHGMDY (SEQ ID | DYYPYHGMD (SEQ ID |
| | H3 | (SEQ ID NO: 47) | NO: 53) | NO: 58) |
| | CDR- | ESVDGYDNSF (SEQ ID | RASESVDGYDNSFMH (SEQ | SESVDGYDNSF (SEQ ID |
| | L1 | NO: 48) | ID NO: 54) | NO: 59) |
| | CDR- | RAS (SEQ ID NO: 49) | RASNLES (SEQ ID NO: 55) | RAS (SEQ ID NO: 49) |
| | L2 | | | |
| | CDR- | QQSSEDPWT (SEQ ID | QQSSEDPWT (SEQ ID NO: 50) | SSEDPW (SEQ ID NO: 60) |
| | L3 | NO: 50) | | |
| | VH | QIQLQQSGPELVRPGASVKISCKASGYSFTDYDINWVNQRPGQGLEWIGWIYPGSGNTRY | | |
| | | SERFKGKATLTVDTSSNTAYMQLSSLTSEDSAVYFCAREDYYPYHGMDYWGQGTSVTV | | |
| | | SS (SEQ ID NO: 68) | | |
| | VL | DIVLTQSPTSLAVSLGQRATISCRASESVDGYDNSFMHWYQQKPGQPPKLLIFRASNLES | | |
| | | GIPARFSGSGSRTDFTLTINPVEAADVATYYCQQSSEDPWTFGGGTKLEIK (SEQ ID NO: | | |
| | | 62) | | |
| Anti- | CDR- | GYSFTSYW (SEQ ID | SYWIG (SEQ ID NO: 144) | GYSFTSY (SEQ ID NO: |
| TfR | H1 | NO: 138) | | 149) |
| clone 8 | CDR- | IYPGDSDT (SEQ ID NO: | IIYPGDSDTRYSPSFQGQ | GDS (SEQ ID NO: 150) |
| | H2 | 139) | (SEQ ID NO: 145) | |
| | CDR- | ARFPYDSSGYYSFDY | FPYDSSGYYSFDY (SEQ ID | PYDSSGYYSFD (SEQ ID |
| | H3 | (SEQ ID NO: 140) | NO: 146) | NO: 151) |
| | CDR- | QSISSY (SEQ ID NO: | RASQSISSYLN (SEQ ID NO: | SQSISSY (SEQ ID NO: 152) |
| | L1 | 141) | 147) | |
| | CDR- | AAS (SEQ ID NO: 142) | AASSLQS (SEQ ID NO: 148) | AAS (SEQ ID NO: 142) |
| | L2 | | | |
| | CDR- | QQSYSTPLT (SEQ ID | QQSYSTPLT (SEQ ID NO: | SYSTPL (SEQ ID NO: 153) |
| | L3 | NO: 143) | 143) | |

*mutation positions are according to Kabat numbering of the respective VH sequences containing the mutations

[0140] In some embodiments, the anti-TfR1 antibody of the present disclosure is a humanized variant of any one of the anti-TfR1 antibodies provided in Table 2. In some embodiments, the anti-TfR1 antibody of the present disclosure comprises a CDR-H1, a CDR-H2, a CDR-H3, a CDR-L1, a CDR-L2, and a CDR-L3 that are the same as the CDR-H1, CDR-H2, and CDR-H3 in any one of the anti-TfR1 antibodies provided in Table 2, and comprises a humanized heavy chain variable region and/or (e.g., and) a humanized light chain variable region.

[0141] Examples of amino acid sequences of anti-TfR1 antibodies described herein are provided in Table 3.

TABLE 3
Variable Regions of Anti-TfR1 Antibodies

| Antibody | Variable Region Amino Acid Sequence** |
|---|---|
| 3A4 | V_{H}: |
| VH3 (N54T*)/Vκ4 | EVQLVQSGSELKKPGASVKVSCTASGFNIKDDYMYWVRQPPGKGLEWIGWIDP |
| | ETGDTEYASKFQDRVTVTADTSTNTAYMELSSLRSEDTAVYYCTLWLRRGLD |
| | YWGQGTLVTVSS (SEQ ID NO: 69) |
| | V_{L}: |
| | DIVMTQSPLSLPVTPGEPASISCRSSKSLLHSNGYTYLFWFQQRPGQSPRLLIYR |
| | MSNLASGVPDRFSGSGSGTDFTLKISRVEAEDVGVYYCMQHLEYPFTFGGGTK |
| | VEIK (SEQ ID NO: 70) |
| 3A4 | V_{H}: |
| VH3 (N54S*)/Vκ4 | EVQLVQSGSELKKPGASVKVSCTASGFNIKDDYMYWVRQPPGKGLEWIGWIDP |
| | ESGDTEYASKFQDRVTVTADTSTNTAYMELSSLRSEDTAVYYCTLWLRRGLD |
| | YWGQGTLVTVSS (SEQ ID NO: 71) |
| | V_{L}: |
| | DIVMTQSPLSLPVTPGEPASISCRSSKSLLHSNGYTYLFWFQQRPGQSPRLLIYR |
| | MSNLASGVPDRFSGSGSGTDFTLKISRVEAEDVGVYYCMQHLEYPFTFGGGTK |
| | VEIK (SEQ ID NO: 70) |
| 3A4 | VH: |
| VH3 /Vκ4 | EVQLVQSGSELKKPGASVKVSCTASGFNIKDDYMYWVRQPPGKGLEWIGWIDP |
| | ENGDTEYASKFQDRVTVTADTSTNTAYMELSSLRSEDTAVYYCTLWLRRGLD |
| | YWGQGTLVTVSS (SEQ ID NO: 72) |
| | VL: |
| | DIVMTQSPLSLPVTPGEPASISCRSSKSLLHSNGYTYLFWFQQRPGQSPRLLIYR |
| | MSNLASGVPDRFSGSGSGTDFTLKISRVEAEDVGVYYCMQHLEYPFTFGGGTK |
| | VEIK (SEQ ID NO: 70) |
| 3M12 | VH: |
| VH3/Vκ2 | QVQLQESGPGLVKPSQTLSLTCSVTGYSITSGYYWNWIRQPPGKGLEWMGYITF |
| | DGANNYNPSLKNRVSISRDTSKNQFSLKLSSVTAEDTATYYCTRSSYDYDVLDY |
| | WGQGTTVTVSS (SEQ ID NO: 73) |
| | VL: |
| | DIQMTQSPSSLSASVGDRVTITCRASQDISNFLNWYQQKPGQPVKLLIYYTSRLH |
| | SGVPSRFSGSGSGTDFTLTISSLQPEDFATYFCQQGHTLPYTFGQGTKLEIK (SEQ |
| | ID NO: 74) |
| 3M12 | VH: |
| VH3/Vκ3 | QVQLQESGPGLVKPSQTLSLTCSVTGYSITSGYYWNWIRQPPGKGLEWMGYITF |
| | DGANNYNPSLKNRVSISRDTSKNQFSLKLSSVTAEDTATYYCTRSSYDYDVLDY |
| | WGQGTTVTVSS (SEQ ID NO: 73) |
| | VL: |
| | DIQMTQSPSSLSASVGDRVTITCRASQDISNFLNWYQQKPGQPVKLLIYYTSRLH |
| | SGVPSRFSGSGSGTDFTLTISSLQPEDFATYYCQQGHTLPYTFGQGTKLEIK (SEQ |
| | ID NO: 75) |
| 3M12 | VH: |
| VH4/Vκ2 | QVQLQESGPGLVKPSQTLSLTCTVTGYSITSGYYWNWIRQPPGKGLEWIGYITFD |
| | GANNYNPSLKNRVSISRDTSKNQFSLKLSSVTAEDTATYYCTRSSYDYDVLDYW |
| | GQGTTVTVSS (SEQ ID NO: 76) |
| | VL: |
| | DIQMTQSPSSLSASVGDRVTITCRASQDISNFLNWYQQKPGQPVKLLIYYTSRLH |
| | SGVPSRFSGSGSGTDFTLTISSLQPEDFATYFCQQGHTLPYTFGQGTKLEIK (SEQ |
| | ID NO: 74) |
| 3M12 | VH: |
| VH4/Vκ3 | QVQLQESGPGLVKPSQTLSLTCTVTGYSITSGYYWNWIRQPPGKGLEWIGYITFD |
| | GANNYNPSLKNRVSISRDTSKNQFSLKLSSVTAEDTATYYCTRSSYDYDVLDYW |
| | GQGTTVTVSS (SEQ ID NO: 76) |
| | VL: |
| | DIQMTQSPSSLSASVGDRVTITCRASQDISNFLNWYQQKPGQPVKLLIYYTSRLH |
| | SGVPSRFSGSGSGTDFTLTISSLQPEDFATYYCQQGHTLPYTFGQGTKLEIK (SEQ |
| | ID NO: 75) |
| 5H12 | VH: |
| VH5 (C33Y*)/Vκ3 | QVQLVQSGAEVKKPGASVKVSCKASGYSFTDYYINWVRQAPGQGLEWMGWIY |
| | PGSGNTRYSERFKGRVTITRDTSASTAYMELSSLRSEDTAVYYCAREDYYPYH |
| | GMDYWGQGTLVTVSS (SEQ ID NO: 77) |
| | VL: |
| | DIVLTQSPDSLAVSLGERATINCRASESVDGYDNSFMHWYQQKPGQPPKLLIFR |
| | ASNLESGVPDRFSGSGSRTDFTLTISSLQAEDVAVYYCQQSSEDPWTFGQGTKL |
| | EIK (SEQ ID NO: 78) |
| 5H12 | VH: |
| VH5 (C33D*)/Vκ4 | QVQLVQSGAEVKKPGASVKVSCKASGYSFTDYDINWVRQAPGQGLEWMGWIY |
| | PGSGNTRYSERFKGRVTITRDTSASTAYMELSSLRSEDTAVYYCAREDYYPYH |
| | GMDYWGQGTLVTVSS (SEQ ID NO: 79) |
| | VL: |
| | DIVMTQSPDSLAVSLGERATINCRASESVDGYDNSFMHWYQQKPGQPPKLLIFR |
| | ASNLESGVPDRFSGSGSGTDFTLTISSLQAEDVAVYYCQQSSEDPWTFGQGTKL |
| | EIK (SEQ ID NO: 80) |
| 5H12 | VH: |
| VH5 (C33Y*)/Vκ4 | QVQLVQSGAEVKKPGASVKVSCKASGYSFTDYYINWVRQAPGQGLEWMGWIY |
| | PGSGNTRYSERFKGRVTITRDTSASTAYMELSSLRSEDTAVYYCAREDYYPYH |
| | GMDYWGQGTLVTVSS (SEQ ID NO: 77) |
| | VL: |
| | DIVMTQSPDSLAVSLGERATINCRASESVDGYDNSFMHWYQQKPGQPPKLLIFR |
| | ASNLESGVPDRFSGSGSGTDFTLTISSLQAEDVAVYYCQQSSEDPWTFGQGTKL |
| | EIK (SEQ ID NO: 80) |
| Anti-TfR clone 8 | VH: |
| | QVQLVQSGAEVKKPGESLKISCKGSGYSFTSYWIGWVRQMPGKGLEWMGIIYP |
| | GDSDTRYSPSFQGQVTISADKSISTAYLQWSSLKASDTAMYYCARFPYDSSGYY |
| | SFDYWGQGTLVTVSS (SEQ ID NO: 154) |
| | VL: |
| | DIQMTQSPSSLSASVGDRVTITCRASQSISSYLNWYQQKPGKAPKLLIYAASSLQ |
| | SGVPSRFSGSGSGTDFTLTISSLQPEDFATYYCQQSYSTPLTFGGGTKVEIK (SEQ |
| | ID NO: 155) |

*mutation positions are according to Kabat numbering of the respective VH sequences containing the mutations
**CDRs according to the Kabat numbering system are bolded

[0142] In some embodiments, the anti-TfR1 antibody of the present disclosure comprises a VH comprising the CDR-H1, CDR-H2, and CDR-H3 of any one of the anti-TfR1 antibodies provided in Table 3 and comprises one or more (e.g., 1, 2, 3, 4, 5, 6, 7, 8, 9, 10 or more) amino acid variations in the framework regions as compared with the respective VH provided in Table 3. Alternatively or in addition (e.g., in addition), the anti-TfR1 antibody of the present disclosure comprises a VL comprising the CDR-L1, CDR-L2, and CDR-L3 of any one of the anti-TfR1 antibodies provided in Table 3 and comprises one or more (e.g., 1, 2, 3, 4, 5, 6, 7, 8, 9, 10 or more) amino acid variations in the framework regions as compared with the respective VL provided in Table 3. In some embodiments, the VH of the anti-TfR1 antibody is a humanized VH, and/or the VL of the anti-TfR1 antibody is a humanized VL.

[0143] In some embodiments, the anti-TfR1 antibody of the present disclosure comprises a VH comprising the CDR-H1, CDR-H2, and CDR-H3 of any one of the anti-TfR1 antibodies provided in Table 3 and comprising an amino acid sequence that is at least 70% (e.g., at least 70%, at least 75%, at least 80%, at least 85%, at least 90%, at least 95%, at least 99%) identical in the framework regions as compared with the respective VH provided in Table 3. Alternatively or in addition (e.g., in addition), the anti-TfR1 antibody of the present disclosure comprises a VL comprising the CDR-L1, CDR-L2, and CDR-L3 of any one of the anti-TfR1 antibodies provided in Table 3 and comprising an amino acid sequence that is at least 70% (e.g., at least 70%, at least 75%, at least 80%, at least 85%, at least 90%, at least 95%, at least 99%) identical in the framework regions as compared with the respective VL provided in Table 3. In some embodiments, the VH of the anti-TfR1 antibody is a humanized VH, and/or the VL of the anti-TfR1 antibody is a humanized VL.

[0144] In some embodiments, the anti-TfR1 antibody of the present disclosure comprises a VH comprising the amino acid sequence of SEQ ID NO: 69 and a VL comprising the amino acid sequence of SEQ ID NO: 70.

[0145] In some embodiments, the anti-TfR1 antibody of the present disclosure comprises a VH comprising the amino acid sequence of SEQ ID NO: 71 and a VL comprising the amino acid sequence of SEQ ID NO: 70.

[0146] In some embodiments, the anti-TfR1 antibody of the present disclosure comprises a VH comprising the amino acid sequence of SEQ ID NO: 72 and a VL comprising the amino acid sequence of SEQ ID NO: 70.

[0147] In some embodiments, the anti-TfR1 antibody of the present disclosure comprises a VH comprising the amino acid sequence of SEQ ID NO: 73 and a VL comprising the amino acid sequence of SEQ ID NO: 74.

[0148] In some embodiments, the anti-TfR1 antibody of the present disclosure comprises a VH comprising the amino acid sequence of SEQ ID NO: 73 and a VL comprising the amino acid sequence of SEQ ID NO: 75.

[0149] In some embodiments, the anti-TfR1 antibody of the present disclosure comprises a VH comprising the amino acid sequence of SEQ ID NO: 76 and a VL comprising the amino acid sequence of SEQ ID NO: 74.

[0150] In some embodiments, the anti-TfR1 antibody of the present disclosure comprises a VH comprising the amino acid sequence of SEQ ID NO: 76 and a VL comprising the amino acid sequence of SEQ ID NO: 75.

[0151] In some embodiments, the anti-TfR1 antibody of the present disclosure comprises a VH comprising the amino acid sequence of SEQ ID NO: 77 and a VL comprising the amino acid sequence of SEQ ID NO: 78.

[0152] In some embodiments, the anti-TfR1 antibody of the present disclosure comprises a VH comprising the amino acid sequence of SEQ ID NO: 79 and a VL comprising the amino acid sequence of SEQ ID NO: 80.

[0153] In some embodiments, the anti-TfR1 antibody of the present disclosure comprises a VH comprising the amino acid sequence of SEQ ID NO: 77 and a VL comprising the amino acid sequence of SEQ ID NO: 80.

[0154] In some embodiments, the anti-TfR1 antibody of the present disclosure comprises a VH comprising the amino acid sequence of SEQ ID NO: 154 and a VL comprising the amino acid sequence of SEQ ID NO: 155.

[0155] In some embodiments, the anti-TfR1 antibody described herein is a full-length IgG, which can include a heavy constant region and a light constant region from a human antibody. In some embodiments, the heavy chain of any of the anti-TfR1 antibodies as described herein may comprise a heavy chain constant region (CH) or a portion thereof (e.g., CH1, CH2, CH3, or a combination thereof). The heavy chain constant region can be of any suitable origin, e.g., human, mouse, rat, or rabbit. In one specific example, the heavy chain constant region is from a human IgG (a gamma heavy chain), e.g., IgG1, IgG2, or IgG4. An example of a human IgG1 constant region is given below:

(SEQ ID NO: 81)
[sequence omitted]

[0156] In some embodiments, the heavy chain of any of the anti-TfR1 antibodies described herein comprises a mutant human IgG1 constant region. For example, the introduction of LALA mutations (a mutant derived from mAb b12 that has been mutated to replace the lower hinge residues Leu234 Leu235 with Ala234 and Ala235) in the CH2 domain of human IgG1 is known to reduce Fcγ receptor binding (Bruhns, P., et al. (2009) and Xu, D. et al. (2000)). The mutant human IgG1 constant region is provided below (mutations bonded and underlined):

(SEQ ID NO: 82)
ASTKGPSVFPLAPSSKSTSGGTAALGCLVKDYFPEPVTVSWNSGALTSGV
HTFPAVLQSSGLYSLSSVVTVPSSSLGTQTYICNVNHKPSNTKVDKKVEP
KSCDKTHTCPPCPAPEAAGGPSVFLFPPKPKDTLMISRTPEVTCVVVDVS
HEDPEVKFNWYVDGVEVHNAKTKPREEQYNSTYRVVSVLTVLHQDWLNGK
EYKCKVSNKALPAPIEKTISKAKGQPREPQVYTLPPSRDELTKNQVSLTC
LVKGFYPSDIAVEWESNGQPENNYKTTPPVLDSDGSFFLYSKLTVDKSRW
QQGNVFSCSVMHEALHNHYTQKSLSLSPGK

[0157] In some embodiments, the light chain of any of the anti-TfR1 antibodies described herein may further comprise a light chain constant region (CL), which can be any CL known in the art. In some examples, the CL is a kappa light chain. In other examples, the CL is a lambda light chain. In some embodiments, the CL is a kappa light chain, the sequence of which is provided below:

(SEQ ID NO: 83)
RTVAAPSVFIFPPSDEQLKSGTASVVCLLNNFYPREAKVQWKVDNALQSG
NSQESVTEQDSKDSTYSLSSTLTLSKADYEKHKVYACEVTHQGLSSPVTK
SFNRGEC

[0158] Other antibody heavy and light chain constant regions are well known in the art, e.g., those provided in the IMGT database (www.imgt.org) or at www.vbase2.org/vbstat.php, both of which are incorporated by reference herein.

[0159] In some embodiments, the anti-TfR1 antibody described herein comprises a heavy chain comprising any one of the VH as listed in Table 3 or any variants thereof and a heavy chain constant region that is at least 80%, at least 85%, at least 90%, at least 95%, or at least 99% identical to SEQ ID NO: 81 or SEQ ID NO: 82. In some embodiments, the anti-TfR1 antibody described herein comprises a heavy chain comprising any one of the VH as listed in Table 3 or any variants thereof and a heavy chain constant region that contains no more than 25 amino acid variations (e.g., no more than 25, 24, 23, 22, 21, 20, 19, 18, 17, 16, 15, 14, 13, 12, 11, 10, 9, 8, 7, 6, 5, 4, 3, 2, or 1 amino acid variation) as compared with SEQ ID NO: 81 or SEQ ID NO: 82. In some embodiments, the anti-TfR1 antibody described herein comprises a heavy chain comprising any one of the VH as listed in Table 3 or any variants thereof and a heavy chain constant region as set forth in SEQ ID NO: 81. In some embodiments, the anti-TfR1 antibody described herein comprises heavy chain comprising any one of the VH as listed in Table 3 or any variants thereof and a heavy chain constant region as set forth in SEQ ID NO: 82.

[0160] In some embodiments, the anti-TfR1 antibody described herein comprises a light chain comprising any one of the VL as listed in Table 3 or any variants thereof and a light chain constant region that is at least 80%, at least 85%, at least 90%, at least 95%, or at least 99% identical to SEQ ID NO: 83. In some embodiments, the anti-TfR1 antibody described herein comprises a light chain comprising any one of the VL as listed in Table 3 or any variants thereof and a light chain constant region contains no more than 25 amino acid variations (e.g., no more than 25, 24, 23, 22, 21, 20, 19, 18, 17, 16, 15, 14, 13, 12, 11, 10, 9, 8, 7, 6, 5, 4, 3, 2, or 1 amino acid variation) as compared with SEQ ID NO: 83. In some embodiments, the anti-TfR1 antibody described herein comprises a light chain comprising any one of the VL as listed in Table 3 or any variants thereof and a light chain constant region set forth in SEQ ID NO: 83.

[0161] Examples of IgG heavy chain and light chain amino acid sequences of the anti-TfR1 antibodies described are provided in Table 4 below.

TABLE 4
Heavy chain and light chain sequences of examples of anti-TfR1 IgGs

| Antibody | IgG Heavy Chain/Light Chain Sequences** |
|---|---|
| 3A4 | Heavy Chain (with wild type human IgG1 constant region) |
| VH3 (N54T*)/Vκ4 | EVQLVQSGSELKKPGASVKVSCTASGFNIKDDYMYWVRQPPGKGLEWIGWIDPE |
| | TGDTEYASKFQDRVTVTADTSTNTAYMELSSLRSEDTAVYYCTLWLRRGLDYW |
| | GQGTLVTVSSASTKGPSVFPLAPSSKSTSGGTAALGCLVKDYFPEPVTVSWNSGAL |
| | TSGVHTFPAVLQSSGLYSLSSVVTVPSSSLGTQTYICNVNHKPSNTKVDKKVEPKS |
| | CDKTHTCPPCPAPELLGGPSVFLFPPKPKDTLMISRTPEVTCVVVDVSHEDPEVKFN |
| | WYVDGVEVHNAKTKPREEQYNSTYRVVSVLTVLHQDWLNGKEYKCKVSNKALP |
| | APIEKTISKAKGQPREPQVYTLPPSRDELTKNQVSLTCLVKGFYPSDIAVEWESNGQ |
| | PENNYKTTPPVLDSDGSFFLYSKLTVDKSRWQQGNVFSCSVMHEALHNHYTQKSL |
| | SLSPGK (SEQ ID NO: 84) |
| | Light Chain (with kappa light chain constant region) |
| | DIVMTQSPLSLPVTPGEPASISCRSSKSLLHSNGYTYLFWFQQRPGQSPRLLIYRMS |
| | NLASGVPDRFSGSGSGTDFTLKISRVEAEDVGVYYCMQHLEYPFTFGGGTKVEIK |
| | RTVAAPSVFIFPPSDEQLKSGTASVVCLLNNFYPREAKVQWKVDNALQSGNSQES |
| | VTEQDSKDSTYSLSSTLTLSKADYEKHKVYACEVTHQGLSSPVTKSFNRGEC (SEQ |
| | ID NO: 85) |
| 3A4 | Heavy Chain (with wild type human IgG1 constant region) |
| VH3 (N54S*)/Vκ4 | EVQLVQSGSELKKPGASVKVSCTASGFNIKDDYMYWVRQPPGKGLEWIGWIDPE |
| | SGDTEYASKFQDRVTVTADTSTNTAYMELSSLRSEDTAVYYCTLWLRRGLDYW |
| | GQGTLVTVSSASTKGPSVFPLAPSSKSTSGGTAALGCLVKDYFPEPVTVSWNSGAL |
| | TSGVHTFPAVLQSSGLYSLSSVVTVPSSSLGTQTYICNVNHKPSNTKVDKKVEPKS |
| | CDKTHTCPPCPAPELLGGPSVFLFPPKPKDTLMISRTPEVTCVVVDVSHEDPEVKFN |
| | WYVDGVEVHNAKTKPREEQYNSTYRVVSVLTVLHQDWLNGKEYKCKVSNKALP |
| | APIEKTISKAKGQPREPQVYTLPPSRDELTKNQVSLTCLVKGFYPSDIAVEWESNGQ |
| | PENNYKTTPPVLDSDGSFFLYSKLTVDKSRWQQGNVFSCSVMHEALHNHYTQKSL |
| | SLSPGK (SEQ ID NO: 86) |
| | Light Chain (with kappa light chain constant region) |
| | DIVMTQSPLSLPVTPGEPASISCRSSKSLLHSNGYTYLFWFQQRPGQSPRLLIYRMS |
| | NLASGVPDRFSGSGSGTDFTLKISRVEAEDVGVYYCMQHLEYPFTFGGGTKVEIK |
| | RTVAAPSVFIFPPSDEQLKSGTASVVCLLNNFYPREAKVQWKVDNALQSGNSQES |
| | VTEQDSKDSTYSLSSTLTLSKADYEKHKVYACEVTHQGLSSPVTKSFNRGEC (SEQ |
| | ID NO: 85) |
| 3A4 | Heavy Chain (with wild type human IgG1 constant region) |
| VH3 /Vκ4 | EVQLVQSGSELKKPGASVKVSCTASGFNIKDDYMYWVRQPPGKGLEWIGWIDPE |
| | NGDTEYASKFQDRVTVTADTSTNTAYMELSSLRSEDTAVYYCTLWLRRGLDYW |
| | GQGTLVTVSSASTKGPSVFPLAPSSKSTSGGTAALGCLVKDYFPEPVTVSWNSGAL |
| | TSGVHTFPAVLQSSGLYSLSSVVTVPSSSLGTQTYICNVNHKPSNTKVDKKVEPKS |
| | CDKTHTCPPCPAPELLGGPSVFLFPPKPKDTLMISRTPEVTCVVVDVSHEDPEVKFN |
| | WYVDGVEVHNAKTKPREEQYNSTYRVVSVLTVLHQDWLNGKEYKCKVSNKALP |
| | APIEKTISKAKGQPREPQVYTLPPSRDELTKNQVSLTCLVKGFYPSDIAVEWESNGQ |
| | PENNYKTTPPVLDSDGSFFLYSKLTVDKSRWQQGNVFSCSVMHEALHNHYTQKSL |
| | SLSPGK (SEQ ID NO: 87) |
| | Light Chain (with kappa light chain constant region) |
| | DIVMTQSPLSLPVTPGEPASISCRSSKSLLHSNGYTYLFWFQORPGQSPRLLIYRMS |
| | NLASGVPDRFSGSGSGTDFTLKISRVEAEDVGVYYCMQHLEYPFTFGGGTKVEIK |
| | RTVAAPSVFIFPPSDEQLKSGTASVVCLLNNFYPREAKVQWKVDNALQSGNSQES |
| | VTEQDSKDSTYSLSSTLTLSKADYEKHKVYACEVTHQGLSSPVTKSFNRGEC (SEQ |
| | ID NO: 85) |
| 3M12 | Heavy Chain (with wild type human IgG1 constant region) |
| VH3/Vκ2 | QVQLQESGPGLVKPSQTLSLTCSVTGYSITSGYYWNWIRQPPGKGLEWMGYITFD |
| | GANNYNPSLKNRVSISRDTSKNQFSLKLSSVTAEDTATYYCTRSSYDYDVLDYWG |
| | QGTTVTVSSASTKGPSVFPLAPSSKSTSGGTAALGCLVKDYFPEPVTVSWNSGALT |
| | SGVHTFPAVLQSSGLYSLSSVVTVPSSSLGTQTYICNVNHKPSNTKVDKKVEPKSC |
| | DKTHTCPPCPAPELLGGPSVFLFPPKPKDTLMISRTPEVTCVVVDVSHEDPEVKFN |
| | WYVDGVEVHNAKTKPREEQYNSTYRVVSVLTVLHQDWLNGKEYKCKVSNKALP |
| | APIEKTISKAKGQPREPQVYTLPPSRDELTKNQVSLTCLVKGFYPSDIAVEWESNGQ |
| | PENNYKTTPPVLDSDGSFFLYSKLTVDKSRWQQGNVFSCSVMHEALHNHYTQKSL |
| | SLSPGK (SEQ ID NO: 88) |
| | Light Chain (with kappa light chain constant region) |
| | DIQMTQSPSSLSASVGDRVTITCRASQDISNFLNWYQQKPGQPVKLLIYYTSRLHS |
| | GVPSRFSGSGSGTDFTLTISSLQPEDFATYFCQQGHTLPYTFGQGTKLEIKRTVAAP |
| | SVFIFPPSDEQLKSGTASVVCLLNNFYPREAKVQWKVDNALQSGNSQESVTEQDSK |
| | DSTYSLSSTLTLSKADYEKHKVYACEVTHQGLSSPVTKSFNRGEC (SEQ ID NO: 89) |
| 3M12 | Heavy Chain (with wild type human IgG1 constant region) |
| VH3/Vκ3 | QVQLQESGPGLVKPSQTLSLTCSVTGYSITSGYYWNWIRQPPGKGLEWMGYITFD |
| | GANNYNPSLKNRVSISRDTSKNQFSLKLSSVTAEDTATYYCTRSSYDYDVLDYWG |
| | QGTTVTVSSASTKGPSVFPLAPSSKSTSGGTAALGCLVKDYFPEPVTVSWNSGALT |
| | SGVHTFPAVLQSSGLYSLSSVVTVPSSSLGTQTYICNVNHKPSNTKVDKKVEPKSC |
| | DKTHTCPPCPAPELLGGPSVFLFPPKPKDTLMISRTPEVTCVVVDVSHEDPEVKFN |
| | WYVDGVEVHNAKTKPREEQYNSTYRVVSVLTVLHQDWLNGKEYKCKVSNKALP |
| | APIEKTISKAKGQPREPQVYTLPPSRDELTKNQVSLTCLVKGFYPSDIAVEWESNGQ |
| | PENNYKTTPPVLDSDGSFFLYSKLTVDKSRWQQGNVFSCSVMHEALHNHYTQKSL |
| | SLSPGK (SEQ ID NO: 88) |
| | Light Chain (with kappa light chain constant region) |
| | DIQMTQSPSSLSASVGDRVTITCRASQDISNFLNWYQQKPGQPVKLLIYYTSRLHS |
| | GVPSRFSGSGSGTDFTLTISSLQPEDFATYYCQQGHTLPYTFGQGTKLEIKRTVAA |
| | PSVFIFPPSDEQLKSGTASVVCLLNNFYPREAKVQWKVDNALQSGNSQESVTEQDS |
| | KDSTYSLSSTLTLSKADYEKHKVYACEVTHQGLSSPVTKSFNRGEC (SEQ ID NO: |
| | 90) |
| 3M12 | Heavy Chain (with wild type human IgG1 constant region) |
| VH4/Vκ2 | QVQLQESGPGLVKPSQTLSLTCTVTGYSITSGYYWNWIRQPPGKGLEWIGYITFDG |
| | ANNYNPSLKNRVSISRDTSKNQFSLKLSSVTAEDTATYYCTRSSYDYDVLDYWGQ |
| | GTTVTVSSASTKGPSVFPLAPSSKSTSGGTAALGCLVKDYFPEPVTVSWNSGALTS |
| | GVHTFPAVLQSSGLYSLSSVVTVPSSSLGTQTYICNVNHKPSNTKVDKKVEPKSCD |
| | KTHTCPPCPAPELLGGPSVFLFPPKPKDTLMISRTPEVTCVVVDVSHEDPEVKFNW |
| | YVDGVEVHNAKTKPREEQYNSTYRVVSVLTVLHQDWLNGKEYKCKVSNKALPA |
| | PIEKTISKAKGQPREPQVYTLPPSRDELTKNQVSLTCLVKGFYPSDIAVEWESNGQP |
| | ENNYKTTPPVLDSDGSFFLYSKLTVDKSRWQQGNVFSCSVMHEALHNHYTQKSLS |
| | LSPGK (SEQ ID NO: 91) |
| | Light Chain (with kappa light chain constant region) |
| | DIQMTQSPSSLSASVGDRVTITCRASQDISNFLNWYQQKPGQPVKLLIYYTSRLHS |
| | GVPSRFSGSGSGTDFTLTISSLQPEDFATYFCQQGHTLPYTFGQGTKLEIKRTVAAP |
| | SVFIFPPSDEQLKSGTASVVCLLNNFYPREAKVQWKVDNALQSGNSQESVTEQDSK |
| | DSTYSLSSTLTLSKADYEKHKVYACEVTHQGLSSPVTKSFNRGEC (SEQ ID NO: 89) |
| 3M12 | Heavy Chain (with wild type human IgG1 constant region) |
| VH4/Vκ3 | QVQLQESGPGLVKPSQTLSLTCTVTGYSITSGYYWNWIRQPPGKGLEWIGYITFDG |
| | ANNYNPSLKNRVSISRDTSKNQFSLKLSSVTAEDTATYYCTRSSYDYDVLDYWGQ |
| | GTTVTVSSASTKGPSVFPLAPSSKSTSGGTAALGCLVKDYFPEPVTVSWNSGALTS |
| | GVHTFPAVLQSSGLYSLSSVVTVPSSSLGTQTYICNVNHKPSNTKVDKKVEPKSCD |
| | KTHTCPPCPAPELLGGPSVFLFPPKPKDTLMISRTPEVTCVVVDVSHEDPEVKFNW |
| | YVDGVEVHNAKTKPREEQYNSTYRVVSVLTVLHQDWLNGKEYKCKVSNKALPA |
| | PIEKTISKAKGQPREPQVYTLPPSRDELTKNQVSLTCLVKGFYPSDIAVEWESNGQP |
| | ENNYKTTPPVLDSDGSFFLYSKLTVDKSRWQQGNVFSCSVMHEALHNHYTQKSLS |
| | LSPGK (SEQ ID NO: 91) |
| | Light Chain (with kappa light chain constant region) |
| | DIQMTQSPSSLSASVGDRVTITCRASQDISNFLNWYQQKPGQPVKLLIYYTSRLHS |
| | GVPSRFSGSGSGTDFTLTISSLQPEDFATYYCQQGHTLPYTFGQGTKLEIKRTVAA |
| | PSVFIFPPSDEQLKSGTASVVCLLNNFYPREAKVQWKVDNALQSGNSQESVTEQDS |
| | KDSTYSLSSTLTLSKADYEKHKVYACEVTHQGLSSPVTKSFNRGEC (SEQ ID NO: |
| | 90) |
| 5H12 | Heavy Chain (with wild type human IgG1 constant region) |
| VH5 (C33Y*)/Vκ3 | QVQLVQSGAEVKKPGASVKVSCKASGYSFTDYYINWVRQAPGQGLEWMGWIYP |
| | GSGNTRYSERFKGRVTITRDTSASTAYMELSSLRSEDTAVYYCAREDYYPYHGM |
| | DYWGQGTLVTVSSASTKGPSVFPLAPSSKSTSGGTAALGCLVKDYFPEPVTVSWN |
| | SGALTSGVHTFPAVLQSSGLYSLSSVVTVPSSSLGTQTYICNVNHKPSNTKVDKKV |
| | EPKSCDKTHTCPPCPAPELLGGPSVFLFPPKPKDTLMISRTPEVTCVVVDVSHEDPE |
| | VKFNWYVDGVEVHNAKTKPREEQYNSTYRVVSVLTVLHQDWLNGKEYKCKVSN |
| | KALPAPIEKTISKAKGQPREPQVYTLPPSRDELTKNQVSLTCLVKGFYPSDIAVEWE |
| | SNGQPENNYKTTPPVLDSDGSFFLYSKLTVDKSRWQQGNVFSCSVMHEALHNHYT |
| | QKSLSLSPGK (SEQ ID NO: 92) |
| | Light Chain (with kappa light chain constant region) |
| | DIVLTQSPDSLAVSLGERATINCRASESVDGYDNSFMHWYQQKPGQPPKLLIFRAS |
| | NLESGVPDRESGSGSRTDFTLTISSLQAEDVAVYYCQQSSEDPWTFGQGTKLEIKR |
| | TVAAPSVFIFPPSDEQLKSGTASVVCLLNNFYPREAKVQWKVDNALQSGNSQESVT |
| | EQDSKDSTYSLSSTLTLSKADYEKHKVYACEVTHQGLSSPVTKSFNRGEC (SEQ ID |
| | NO: 93) |
| 5H12 | Heavy Chain (with wild type human IgG1 constant region) |
| VH5 (C33D*)/Vκ4 | QVQLVQSGAEVKKPGASVKVSCKASGYSFTDYDINWVRQAPGQGLEWMGWIYP |
| | GSGNTRYSERFKGRVTITRDTSASTAYMELSSLRSEDTAVYYCAREDYYPYHGM |
| | DYWGQGTLVTVSSASTKGPSVFPLAPSSKSTSGGTAALGCLVKDYFPEPVTVSWN |
| | SGALTSGVHTFPAVLQSSGLYSLSSVVTVPSSSLGTQTYICNVNHKPSNTKVDKKV |
| | EPKSCDKTHTCPPCPAPELLGGPSVFLFPPKPKDTLMISRTPEVTCVVVDVSHEDPE |
| | VKFNWYVDGVEVHNAKTKPREEQYNSTYRVVSVLTVLHQDWLNGKEYKCKVSN |
| | KALPAPIEKTISKAKGQPREPQVYTLPPSRDELTKNQVSLTCLVKGFYPSDIAVEWE |
| | SNGQPENNYKTTPPVLDSDGSFFLYSKLTVDKSRWQQGNVFSCSVMHEALHNHYT |
| | QKSLSLSPGK (SEQ ID NO: 94) |
| | Light Chain (with kappa light chain constant region) |
| | DIVMTQSPDSLAVSLGERATINCRASESVDGYDNSFMHWYQQKPGQPPKLLIFRA |
| | SNLESGVPDRESGSGSGTDFTLTISSLQAEDVAVYYCQQSSEDPWTFGQGTKLEIK |
| | RTVAAPSVFIFPPSDEQLKSGTASVVCLLNNFYPREAKVQWKVDNALQSGNSQES |
| | VTEQDSKDSTYSLSSTLTLSKADYEKHKVYACEVTHQGLSSPVTKSFNRGEC (SEQ |
| | ID NO: 95) |
| 5H12 | Heavy Chain (with wild type human IgG1 constant region) |
| VH5 (C33Y*)/Vκ4 | QVQLVQSGAEVKKPGASVKVSCKASGYSFTDYYINWVRQAPGQGLEWMGWIYP |
| | GSGNTRYSERFKGRVTITRDTSASTAYMELSSLRSEDTAVYYCAREDYYPYHGM |
| | DYWGQGTLVTVSSASTKGPSVFPLAPSSKSTSGGTAALGCLVKDYFPEPVTVSWN |
| | SGALTSGVHTFPAVLQSSGLYSLSSVVTVPSSSLGTQTYICNVNHKPSNTKVDKKV |
| | EPKSCDKTHTCPPCPAPELLGGPSVFLFPPKPKDTLMISRTPEVTCVVVDVSHEDPE |
| | VKFNWYVDGVEVHNAKTKPREEQYNSTYRVVSVLTVLHQDWLNGKEYKCKVSN |
| | KALPAPIEKTISKAKGQPREPQVYTLPPSRDELTKNQVSLTCLVKGFYPSDIAVEWE |
| | SNGQPENNYKTTPPVLDSDGSFFLYSKLTVDKSRWQQGNVFSCSVMHEALHNHYT |
| | QKSLSLSPGK (SEQ ID NO: 92) |
| | Light Chain (with kappa light chain constant region) |
| | DIVMTQSPDSLAVSLGERATINCRASESVDGYDNSFMHWYQQKPGQPPKLLIFRA |
| | SNLESGVPDRFSGSGSGTDFTLTISSLQAEDVAVYYCQQSSEDPWTFGQGTKLEIK |
| | RTVAAPSVFIFPPSDEQLKSGTASVVCLLNNFYPREAKVQWKVDNALQSGNSQES |
| | VTEQDSKDSTYSLSSTLTLSKADYEKHKVYACEVTHQGLSSPVTKSFNRGEC (SEQ |
| | ID NO: 95) |
| Anti-TfR clone 8 | VH: |
| | QVQLVQSGAEVKKPGESLKISCKGSGYSFTSYWIGWVRQMPGKGLEWMGIIYPG |
| | DSDTRYSPSFQGQVTISADKSISTAYLQWSSLKASDTAMYYCARFPYDSSGYYSF |
| | DYWGQGTLVTVSSASTKGPSVFPLAPSSKSTSGGTAALGCLVKDYFPEPVTVSWN |
| | SGALTSGVHTFPAVLQSSGLYSLSSVVTVPSSSLGTQTYICNVNHKPSNTKVDKKV |
| | EPKSCDKTHTCPPCPAPELLGGPSVFLFPPKPKDTLMISRTPEVTCVVVDVSHEDPE |
| | VKFNWYVDGVEVHNAKTKPREEQYNSTYRVVSVLTVLHQDWLNGKEYKCKVSN |
| | KALPAPIEKTISKAKGQPREPQVYTLPPSRDELTKNQVSLTCLVKGFYPSDIAVEWE |
| | SNGQPENNYKTTPPVLDSDGSFFLYSKLTVDKSRWQQGNVFSCSVMHEALHNHYT |
| | QKSLSLSPGK (SEQ ID NO: 156) |
| | VL: |
| | DIQMTQSPSSLSASVGDRVTITCRASQSISSYLNWYQQKPGKAPKLLIYAASSLQS |
| | GVPSRFSGSGSGTDFTLTISSLQPEDFATYYCQQSYSTPLTFGGGTKVEIKRTVAAP |
| | SVFIFPPSDEQLKSGTASVVCLLNNFYPREAKVQWKVDNALQSGNSQESVTEQDSK |
| | DSTYSLSSTLTLSKADYEKHKVYACEVTHQGLSSPVTKSFNRGEC (SEQ ID NO: |
| | 157) |

*mutation positions are according to Kabat numbering of the respective VH sequences containing the mutations
**CDRs according to the Kabat numbering system are bolded; VH/VL sequences underlined

[0162] In some embodiments, the anti-TfR1 antibody of the present disclosure comprises a heavy chain containing no more than 25 amino acid variations (e.g., no more than 25, 24, 23, 22, 21, 20, 19, 18, 17, 16, 15, 14, 13, 12, 11, 10, 9, 8, 7, 6, 5, 4, 3, 2, or 1 amino acid variation) as compared with the heavy chain as set forth in any one of SEQ ID NOs: 84, 86, 87, 88, 91, 92, 94, and 156. Alternatively or in addition (e.g., in addition), the anti-TfR1 antibody of the present disclosure comprises a light chain containing no more than 25 amino acid variations (e.g., no more than 25, 24, 23, 22, 21, 20, 19, 18, 17, 16, 15, 14, 13, 12, 11, 10, 9, 8, 7, 6, 5, 4, 3, 2, or 1 amino acid variation) as compared with the light chain as set forth in any one of SEQ ID NOs: 85, 89, 90, 93, 95, and 157.

[0163] In some embodiments, the anti-TfR1 antibody described herein comprises a heavy chain comprising an amino acid sequence that is at least 75% (e.g., 75%, 80%, 85%, 90%, 95%, 98%, or 99%) identical to any one of SEQ ID NOs: 84, 86, 87, 88, 91, 92, 94, and 156. Alternatively or in addition (e.g., in addition), the anti-TfR1 antibody described herein comprises a light chain comprising an amino acid sequence that is at least 75% (e.g., 75%, 80%, 85%, 90%, 95%, 98%, or 99%) identical to any one of SEQ ID NOs: 85, 89, 90, 93, 95, and 157. In some embodiments, the anti-TfR1 antibody described herein comprises a heavy chain comprising the amino acid sequence of any one of SEQ ID NOs: 84, 86, 87, 88, 91, 92, 94, and 156. Alternatively or in addition (e.g., in addition), the anti-TfR1 antibody described herein comprises a light chain comprising the amino acid sequence of any one of SEQ ID NOs: 85, 89, 90, 93, 95 and 157.

[0164] In some embodiments, the anti-TfR1 antibody of the present disclosure comprises a heavy chain comprising the amino acid sequence of SEQ ID NO: 84 and a light chain comprising the amino acid sequence of SEQ ID NO: 85.

[0165] In some embodiments, the anti-TfR1 antibody of the present disclosure comprises a heavy chain comprising the amino acid sequence of SEQ ID NO: 86 and a light chain comprising the amino acid sequence of SEQ ID NO: 85.

[0166] In some embodiments, the anti-TfR1 antibody of the present disclosure comprises a heavy chain comprising the amino acid sequence of SEQ ID NO: 87 and a light chain comprising the amino acid sequence of SEQ ID NO: 85.

[0167] In some embodiments, the anti-TfR1 antibody of the present disclosure comprises a heavy chain comprising the amino acid sequence of SEQ ID NO: 88 and a light chain comprising the amino acid sequence of SEQ ID NO: 89.

[0168] In some embodiments, the anti-TfR1 antibody of the present disclosure comprises a heavy chain comprising the amino acid sequence of SEQ ID NO: 88 and a light chain comprising the amino acid sequence of SEQ ID NO: 90.

[0169] In some embodiments, the anti-TfR1 antibody of the present disclosure comprises a heavy chain comprising the amino acid sequence of SEQ ID NO: 91 and a light chain comprising the amino acid sequence of SEQ ID NO: 89.

[0170] In some embodiments, the anti-TfR1 antibody of the present disclosure comprises a heavy chain comprising the amino acid sequence of SEQ ID NO: 91 and a light chain comprising the amino acid sequence of SEQ ID NO: 90.

[0171] In some embodiments, the anti-TfR1 antibody of the present disclosure comprises a heavy chain comprising the amino acid sequence of SEQ ID NO: 92 and a light chain comprising the amino acid sequence of SEQ ID NO: 93.

[0172] In some embodiments, the anti-TfR1 antibody of the present disclosure comprises a heavy chain comprising the amino acid sequence of SEQ ID NO: 94 and a light chain comprising the amino acid sequence of SEQ ID NO: 95.

[0173] In some embodiments, the anti-TfR1 antibody of the present disclosure comprises a heavy chain comprising the amino acid sequence of SEQ ID NO: 92 and a light chain comprising the amino acid sequence of SEQ ID NO: 95.

[0174] In some embodiments, the anti-TfR1 antibody of the present disclosure comprises a heavy chain comprising the amino acid sequence of SEQ ID NO: 156 and a light chain comprising the amino acid sequence of SEQ ID NO: 157.

[0175] In some embodiments, the anti-TfR1 antibody is a Fab fragment, Fab′ fragment, or F(ab′)2 fragment of an intact antibody (full-length antibody). Antigen binding fragment of an intact antibody (full-length antibody) can be prepared via routine methods (e.g., recombinantly or by digesting the heavy chain constant region of a full-length IgG using an enzyme such as papain). For example, F(ab′)2 fragments can be produced by pepsin or papain digestion of an antibody molecule, and Fab fragments that can be generated by reducing the disulfide bridges of F(ab′)2 fragments. In some embodiments, a heavy chain constant region in a Fab fragment of the anti-TfR1 antibody described herein comprises the amino acid sequence of:

(SEQ ID NO: 96)
ASTKGPSVFPLAPSSKSTSGGTAALGCLVKDYFPEPVTVSWNSGALTSGV
HTFPAVLQSSGLYSLSSVVTVPSSSLGTQTYICNVNHKPSNTKVDKKVEP
KSCDKTHT

[0176] In some embodiments, the anti-TfR1 antibody described herein comprises a heavy chain comprising any one of the VH as listed in Table 3 or any variants thereof and a heavy chain constant region that is at least 80%, at least 85%, at least 90%, at least 95%, or at least 99% identical to SEQ ID NO: 96. In some embodiments, the anti-TfR1 antibody described herein comprises a heavy chain comprising any one of the VH as listed in Table 3 or any variants thereof and a heavy chain constant region that contains no more than 25 amino acid variations (e.g., no more than 25, 24, 23, 22, 21, 20, 19, 18, 17, 16, 15, 14, 13, 12, 11, 10, 9, 8, 7, 6, 5, 4, 3, 2, or 1 amino acid variation) as compared with SEQ ID NO: 96. In some embodiments, the anti-TfR1 antibody described herein comprises a heavy chain comprising any one of the VH as listed in Table 3 or any variants thereof and a heavy chain constant region as set forth in SEQ ID NO: 96.

[0177] In some embodiments, the anti-TfR1 antibody described herein comprises a light chain comprising any one of the VL as listed in Table 3 or any variants thereof and a light chain constant region that is at least 80%, at least 85%, at least 90%, at least 95%, or at least 99% identical to SEQ ID NO: 83. In some embodiments, the anti-TfR1 antibody described herein comprises a light chain comprising any one of the VL as listed in Table 3 or any variants thereof and a light chain constant region contains no more than 25 amino acid variations (e.g., no more than 25, 24, 23, 22, 21, 20, 19, 18, 17, 16, 15, 14, 13, 12, 11, 10, 9, 8, 7, 6, 5, 4, 3, 2, or 1 amino acid variation) as compared with SEQ ID NO: 83. In some embodiments, the anti-TfR1 antibody described herein comprises a light chain comprising any one of the VL as listed in Table 3 or any variants thereof and a light chain constant region set forth in SEQ ID NO: 83.

[0178] Examples of Fab heavy chain and light chain amino acid sequences of the anti-TfR1 antibodies described are provided in Table 5 below.

TABLE 5
Heavy chain and light chain sequences of examples of anti-TfR1 Fabs

| Antibody | Fab Heavy Chain/Light Chain Sequences** |
|---|---|
| 3A4 | Heavy Chain (with partial human IgG1 constant region) |
| VH3 (N54T*)/Vκ4 | EVQLVQSGSELKKPGASVKVSCTASGFNIKDDYMYWVRQPPGKGLEWIGWIDPE |
| | TGDTEYASKFQDRVTVTADTSTNTAYMELSSLRSEDTAVYYCTLWLRRGLDYW |
| | GQGTLVTVSSASTKGPSVFPLAPSSKSTSGGTAALGCLVKDYFPEPVTVSWNSGAL |
| | TSGVHTFPAVLQSSGLYSLSSVVTVPSSSLGTQTYICNVNHKPSNTKVDKKVEPKS |
| | CDKTHT (SEQ ID NO: 97) |
| | Light Chain (with kappa light chain constant region) |
| | DIVMTQSPLSLPVTPGEPASISCRSSKSLLHSNGYTYLFWFQQRPGQSPRLLIYRMS |
| | NLASGVPDRFSGSGSGTDFTLKISRVEAEDVGVYYCMQHLEYPFTFGGGTKVEIK |
| | RTVAAPSVFIFPPSDEQLKSGTASVVCLLNNFYPREAKVQWKVDNALQSGNSQES |
| | VTEQDSKDSTYSLSSTLTLSKADYEKHKVYACEVTHQGLSSPVTKSFNRGEC (SEQ |
| | ID NO: 85) |
| 3A4 | Heavy Chain (with partial human IgG1 constant region) |
| VH3 (N54S*)/Vκ4 | EVQLVQSGSELKKPGASVKVSCTASGFNIKDDYMYWVRQPPGKGLEWIGWIDPE |
| | SGDTEYASKFQDRVTVTADTSTNTAYMELSSLRSEDTAVYYCTLWLRRGLDYW |
| | GQGTLVTVSSASTKGPSVFPLAPSSKSTSGGTAALGCLVKDYFPEPVTVSWNSGAL |
| | TSGVHTFPAVLQSSGLYSLSSVVTVPSSSLGTQTYICNVNHKPSNTKVDKKVEPKS |
| | CDKTHT (SEQ ID NO: 98) |
| | Light Chain (with kappa light chain constant region) |
| | DIVMTQSPLSLPVTPGEPASISCRSSKSLLHSNGYTYLFWFQQRPGQSPRLLIYRMS |
| | NLASGVPDRFSGSGSGTDFTLKISRVEAEDVGVYYCMQHLEYPFTFGGGTKVEIK |
| | RTVAAPSVFIFPPSDEQLKSGTASVVCLLNNFYPREAKVQWKVDNALQSGNSQES |
| | VTEQDSKDSTYSLSSTLTLSKADYEKHKVYACEVTHQGLSSPVTKSFNRGEC (SEQ |
| | ID NO: 85) |
| 3A4 | Heavy Chain (with partial human IgG1 constant region) |
| VH3 /Vκ4 | EVQLVQSGSELKKPGASVKVSCTASGFNIKDDYMYWVRQPPGKGLEWIGWIDPE |
| | NGDTEYASKFQDRVTVTADTSTNTAYMELSSLRSEDTAVYYCTLWLRRGLDYW |
| | GQGTLVTVSSASTKGPSVFPLAPSSKSTSGGTAALGCLVKDYFPEPVTVSWNSGAL |
| | TSGVHTFPAVLQSSGLYSLSSVVTVPSSSLGTQTYICNVNHKPSNTKVDKKVEPKS |
| | CDKTHT (SEQ ID NO: 99) |
| | Light Chain (with kappa light chain constant region) |
| | DIVMTQSPLSLPVTPGEPASISCRSSKSLLHSNGYTYLFWFQQRPGQSPRLLIYRMS |
| | NLASGVPDRFSGSGSGTDFTLKISRVEAEDVGVYYCMQHLEYPFTFGGGTKVEIK |
| | RTVAAPSVFIFPPSDEQLKSGTASVVCLLNNFYPREAKVQWKVDNALQSGNSQES |
| | VTEQDSKDSTYSLSSTLTLSKADYEKHKVYACEVTHQGLSSPVTKSFNRGEC (SEQ |
| | ID NO: 85) |
| 3M12 | Heavy Chain (with partial human IgG1 constant region) |
| VH3/Vκ2 | QVQLQESGPGLVKPSQTLSLTCSVTGYSITSGYYWNWIRQPPGKGLEWMGYITFD |
| | GANNYNPSLKNRVSISRDTSKNQFSLKLSSVTAEDTATYYCTRSSYDYDVLDYWG |
| | QGTTVTVSSASTKGPSVFPLAPSSKSTSGGTAALGCLVKDYFPEPVTVSWNSGALT |
| | SGVHTFPAVLQSSGLYSLSSVVTVPSSSLGTQTYICNVNHKPSNTKVDKKVEPKSC |
| | DKTHT (SEQ ID NO: 100) |
| | Light Chain (with kappa light chain constant region) |
| | DIQMTQSPSSLSASVGDRVTITCRASQDISNFLNWYQQKPGQPVKLLIYYTSRLHS |
| | GVPSRFSGSGSGTDFTLTISSLQPEDFATYFCQQGHTLPYTFGQGTKLEIKRTVAAP |
| | SVFIFPPSDEQLKSGTASVVCLLNNFYPREAKVQWKVDNALQSGNSQESVTEQDSK |
| | DSTYSLSSTLTLSKADYEKHKVYACEVTHQGLSSPVTKSFNRGEC (SEQ ID NO: 89) |
| 3M12 | Heavy Chain (with partial human IgG1 constant region) |
| VH3/Vκ3 | QVQLQESGPGLVKPSQTLSLTCSVTGYSITSGYYWNWIRQPPGKGLEWMGYITFD |
| | GANNYNPSLKNRVSISRDTSKNQFSLKLSSVTAEDTATYYCTRSSYDYDVLDYWG |
| | QGTTVTVSSASTKGPSVFPLAPSSKSTSGGTAALGCLVKDYFPEPVTVSWNSGALT |
| | SGVHTFPAVLQSSGLYSLSSVVTVPSSSLGTQTYICNVNHKPSNTKVDKKVEPKSC |
| | DKTHT (SEQ ID NO: 100) |
| | Light Chain (with kappa light chain constant region) |
| | DIQMTQSPSSLSASVGDRVTITCRASQDISNFLNWYQQKPGQPVKLLIYYTSRLHS |
| | GVPSRFSGSGSGTDFTLTISSLQPEDFATYYCQQGHTLPYTFGQGTKLEIKRTVAA |
| | PSVFIFPPSDEQLKSGTASVVCLLNNFYPREAKVQWKVDNALQSGNSQESVTEQDS |
| | KDSTYSLSSTLTLSKADYEKHKVYACEVTHQGLSSPVTKSFNRGEC (SEQ ID NO: |
| | 90) |
| 3M12 | Heavy Chain (with partial human IgG1 constant region) |
| VH4/Vκ2 | QVQLQESGPGLVKPSQTLSLTCTVTGYSITSGYYWNWIRQPPGKGLEWIGYITFDG |
| | ANNYNPSLKNRVSISRDTSKNQFSLKLSSVTAEDTATYYCTRSSYDYDVLDYWGQ |
| | GTTVTVSSASTKGPSVFPLAPSSKSTSGGTAALGCLVKDYFPEPVTVSWNSGALTS |
| | GVHTFPAVLQSSGLYSLSSVVTVPSSSLGTQTYICNVNHKPSNTKVDKKVEPKSCD |
| | KTHT (SEQ ID NO: 101) |
| | Light Chain (with kappa light chain constant region) |
| | DIQMTQSPSSLSASVGDRVTITCRASQDISNFLNWYQQKPGQPVKLLIYYTSRLHS |
| | GVPSRFSGSGSGTDFTLTISSLQPEDFATYFCQQGHTLPYTFGQGTKLEIKRTVAAP |
| | SVFIFPPSDEQLKSGTASVVCLLNNFYPREAKVQWKVDNALQSGNSQESVTEQDSK |
| | DSTYSLSSTLTLSKADYEKHKVYACEVTHQGLSSPVTKSFNRGEC (SEQ ID NO: 89) |
| 3M12 | Heavy Chain (with partial human IgG1 constant region) |
| VH4/Vκ3 | QVQLQESGPGLVKPSQTLSLTCTVTGYSITSGYYWNWIRQPPGKGLEWIGYITFDG |
| | ANNYNPSLKNRVSISRDTSKNQFSLKLSSVTAEDTATYYCTRSSYDYDVLDYWGQ |
| | GTTVTVSSASTKGPSVFPLAPSSKSTSGGTAALGCLVKDYFPEPVTVSWNSGALTS |
| | GVHTFPAVLQSSGLYSLSSVVTVPSSSLGTQTYICNVNHKPSNTKVDKKVEPKSCD |
| | KTHT (SEQ ID NO: 101) |
| | Light Chain (with kappa light chain constant region) |
| | DIQMTQSPSSLSASVGDRVTITCRASQDISNFLNWYQQKPGQPVKLLIYYTSRLHS |
| | GVPSRFSGSGSGTDFTLTISSLQPEDFATYYCQQGHTLPYTFGQGTKLEIKRTVAA |
| | PSVFIFPPSDEQLKSGTASVVCLLNNFYPREAKVQWKVDNALQSGNSQESVTEQDS |
| | KDSTYSLSSTLTLSKADYEKHKVYACEVTHQGLSSPVTKSFNRGEC (SEQ ID NO: |
| | 90) |
| 5H12 | Heavy Chain (with partial human IgG1 constant region) |
| VH5 (C33Y*)/Vκ3 | QVQLVQSGAEVKKPGASVKVSCKASGYSFTDYYINWVRQAPGQGLEWMGWIYP |
| | GSGNTRYSERFKGRVTITRDTSASTAYMELSSLRSEDTAVYYCAREDYYPYHGM |
| | DYWGQGTLVTVSSASTKGPSVFPLAPSSKSTSGGTAALGCLVKDYFPEPVTVSWN |
| | SGALTSGVHTFPAVLQSSGLYSLSSVVTVPSSSLGTQTYICNVNHKPSNTKVDKKV |
| | EPKSCDKTHT (SEQ ID NO: 102) |
| | Light Chain (with kappa light chain constant region) |
| | DIVLTQSPDSLAVSLGERATINCRASESVDGYDNSFMHWYQQKPGQPPKLLIFRAS |
| | NLESGVPDRFSGSGSRTDFTLTISSLQAEDVAVYYCOQSSEDPWTFGQGTKLEIKR |
| | TVAAPSVFIFPPSDEQLKSGTASVVCLLNNFYPREAKVQWKVDNALQSGNSQESVT |
| | EQDSKDSTYSLSSTLTLSKADYEKHKVYACEVTHQGLSSPVTKSFNRGEC (SEQ ID |
| | NO: 93) |
| 5H12 | Heavy Chain (with partial human IgG1 constant region) |
| VH5 (C33D*)/Vκ4 | QVQLVQSGAEVKKPGASVKVSCKASGYSFTDYDINWVRQAPGQGLEWMGWIYP |
| | GSGNTRYSERFKGRVTITRDTSASTAYMELSSLRSEDTAVYYCAREDYYPYHGM |
| | DYWGQGTLVTVSSASTKGPSVFPLAPSSKSTSGGTAALGCLVKDYFPEPVTVSWN |
| | SGALTSGVHTFPAVLQSSGLYSLSSVVTVPSSSLGTQTYICNVNHKPSNTKVDKKV |
| | EPKSCDKTHT (SEQ ID NO: 103) |
| | Light Chain (with kappa light chain constant region) |
| | DIVMTQSPDSLAVSLGERATINCRASESVDGYDNSFMHWYQQKPGQPPKLLIFRA |
| | SNLESGVPDRFSGSGSGTDFTLTISSLQAEDVAVYYCQOSSEDPWTFGQGTKLEIK |
| | RTVAAPSVFIFPPSDEQLKSGTASVVCLLNNFYPREAKVQWKVDNALQSGNSQES |
| | VTEQDSKDSTYSLSSTLTLSKADYEKHKVYACEVTHQGLSSPVTKSFNRGEC (SEQ |
| | ID NO: 95) |
| 5H12 | Heavy Chain (with partial human IgG1 constant region) |
| VH5 (C33Y*)/Vκ4 | QVQLVQSGAEVKKPGASVKVSCKASGYSFTDYYINWVRQAPGQGLEWMGWIYP |
| | GSGNTRYSERFKGRVTITRDTSASTAYMELSSLRSEDTAVYYCAREDYYPYHGM |
| | DYWGQGTLVTVSSASTKGPSVFPLAPSSKSTSGGTAALGCLVKDYFPEPVTVSWN |
| | SGALTSGVHTFPAVLQSSGLYSLSSVVTVPSSSLGTQTYICNVNHKPSNTKVDKKV |
| | EPKSCDKTHT (SEQ ID NO: 102) |
| | Light Chain (with kappa light chain constant region) |
| | DIVMTQSPDSLAVSLGERATINCRASESVDGYDNSFMHWYQQKPGQPPKLLIFRA |
| | SNLESGVPDRFSGSGSGTDFTLTISSLQAEDVAVYYCQQSSEDPWTFGQGTKLEIK |
| | RTVAAPSVFIFPPSDEQLKSGTASVVCLLNNFYPREAKVQWKVDNALQSGNSQES |
| | VTEQDSKDSTYSLSSTLTLSKADYEKHKVYACEVTHQGLSSPVTKSFNRGEC (SEQ |
| | ID NO: 95) |
| Anti-TfR clone 8 | VH: |
| Version 1 | QVQLVQSGAEVKKPGESLKISCKGSGYSFTSYWIGWVRQMPGKGLEWMGIIYPG |
| | DSDTRYSPSFQGQVTISADKSISTAYLQWSSLKASDTAMYYCARFPYDSSGYYSF |
| | DYWGQGTLVTVSSASTKGPSVFPLAPSSKSTSGGTAALGCLVKDYFPEPVTVSWN |
| | SGALTSGVHTFPAVLQSSGLYSLSSVVTVPSSSLGTQTYICNVNHKPSNTKVDKKV |
| | EPKSCDKTHTCP (SEQ ID NO: 158) |
| | VL: |
| | DIQMTQSPSSLSASVGDRVTITCRASQSISSYLNWYQQKPGKAPKLLIYAASSLQS |
| | GVPSRFSGSGSGTDFTLTISSLQPEDFATYYCQQSYSTPLTFGGGTKVEIKRTVAAP |
| | SVFIFPPSDEQLKSGTASVVCLLNNFYPREAKVQWKVDNALQSGNSQESVTEQDSK |
| | DSTYSLSSTLTLSKADYEKHKVYACEVTHQGLSSPVTKSFNRGEC (SEQ ID NO: |
| | 157) |
| Anti-TfR clone 8 | VH: |
| Version 2 | QVQLVQSGAEVKKPGESLKISCKGSGYSFTSYWIGWVRQMPGKGLEWMGIIYPG |
| | DSDTRYSPSFQGQVTISADKSISTAYLQWSSLKASDTAMYYCARFPYDSSGYYSF |
| | DYWGQGTLVTVSSASTKGPSVFPLAPSSKSTSGGTAALGCLVKDYFPEPVTVSWN |
| | SGALTSGVHTFPAVLQSSGLYSLSSVVTVPSSSLGTQTYICNVNHKPSNTKVDKKV |
| | EPKSCDKTHT (SEQ ID NO: 159) |
| | VL: |
| | DIQMTQSPSSLSASVGDRVTITCRASQSISSYLNWYQQKPGKAPKLLIYAASSLQS |
| | GVPSRFSGSGSGTDFTLTISSLQPEDFATYYCQQSYSTPLTFGGGTKVEIKRTVAAP |
| | SVFIFPPSDEQLKSGTASVVCLLNNFYPREAKVQWKVDNALQSGNSQESVTEQDSK |
| | DSTYSLSSTLTLSKADYEKHKVYACEVTHQGLSSPVTKSFNRGEC (SEQ ID NO: |
| | 157) |

*mutation positions are according to Kabat numbering of the respective VH sequences containing the mutations
**CDRs according to the Kabat numbering system are bolded; VH/VL sequences underlined

[0179] In some embodiments, the anti-TfR1 antibody of the present disclosure comprises a heavy chain containing no more than 25 amino acid variations (e.g., no more than 25, 24, 23, 22, 21, 20, 19, 18, 17, 16, 15, 14, 13, 12, 11, 10, 9, 8, 7, 6, 5, 4, 3, 2, or 1 amino acid variation) as compared with the heavy chain as set forth in any one of SEQ ID NOs: 97-103, 158 and 159. Alternatively or in addition (e.g., in addition), the anti-TfR1 antibody of the present disclosure comprises a light chain containing no more than 25 amino acid variations (e.g., no more than 25, 24, 23, 22, 21, 20, 19, 18, 17, 16, 15, 14, 13, 12, 11, 10, 9, 8, 7, 6, 5, 4, 3, 2, or 1 amino acid variation) as compared with the light chain as set forth in any one of SEQ ID NOs: 85, 89, 90, 93, 95, and 157.

[0180] In some embodiments, the anti-TfR1 antibody described herein comprises a heavy chain comprising an amino acid sequence that is at least 75% (e.g., 75%, 80%, 85%, 90%, 95%, 98%, or 99%) identical to any one of SEQ ID NOs: 97-103, 158 and 159. Alternatively or in addition (e.g., in addition), the anti-TfR1 antibody described herein comprises a light chain comprising an amino acid sequence that is at least 75% (e.g., 75%, 80%, 85%, 90%, 95%, 98%, or 99%) identical to any one of SEQ ID NOs: 85, 89, 90, 93, 95, and 157. In some embodiments, the anti-TfR1 antibody described herein comprises a heavy chain comprising the amino acid sequence of any one of SEQ ID NOs: 97-103, 158 and 159. Alternatively or in addition (e.g., in addition), the anti-TfR1 antibody described herein comprises a light chain comprising the amino acid sequence of any one of SEQ ID NOs: 85, 89, 90, 93, 95, and 157.

[0181] In some embodiments, the anti-TfR1 antibody of the present disclosure comprises a heavy chain comprising the amino acid sequence of SEQ ID NO: 97 and a light chain comprising the amino acid sequence of SEQ ID NO: 85.

[0182] In some embodiments, the anti-TfR1 antibody of the present disclosure comprises a heavy chain comprising the amino acid sequence of SEQ ID NO: 98 and a light chain comprising the amino acid sequence of SEQ ID NO: 85.

[0183] In some embodiments, the anti-TfR1 antibody of the present disclosure comprises a heavy chain comprising the amino acid sequence of SEQ ID NO: 99 and a light chain comprising the amino acid sequence of SEQ ID NO: 85.

[0184] In some embodiments, the anti-TfR1 antibody of the present disclosure comprises a heavy chain comprising the amino acid sequence of SEQ ID NO: 100 and a light chain comprising the amino acid sequence of SEQ ID NO: 89.

[0185] In some embodiments, the anti-TfR1 antibody of the present disclosure comprises a heavy chain comprising the amino acid sequence of SEQ ID NO: 100 and a light chain comprising the amino acid sequence of SEQ ID NO: 90.

[0186] In some embodiments, the anti-TfR1 antibody of the present disclosure comprises a heavy chain comprising the amino acid sequence of SEQ ID NO: 101 and a light chain comprising the amino acid sequence of SEQ ID NO: 89.

[0187] In some embodiments, the anti-TfR1 antibody of the present disclosure comprises a heavy chain comprising the amino acid sequence of SEQ ID NO: 101 and a light chain comprising the amino acid sequence of SEQ ID NO: 90.

[0188] In some embodiments, the anti-TfR1 antibody of the present disclosure comprises a heavy chain comprising the amino acid sequence of SEQ ID NO: 102 and a light chain comprising the amino acid sequence of SEQ ID NO: 93.

[0189] In some embodiments, the anti-TfR1 antibody of the present disclosure comprises a heavy chain comprising the amino acid sequence of SEQ ID NO: 103 and a light chain comprising the amino acid sequence of SEQ ID NO: 95.

[0190] In some embodiments, the anti-TfR1 antibody of the present disclosure comprises a heavy chain comprising the amino acid sequence of SEQ ID NO: 102 and a light chain comprising the amino acid sequence of SEQ ID NO: 95.

[0191] In some embodiments, the anti-TfR1 antibody of the present disclosure comprises a heavy chain comprising the amino acid sequence of SEQ ID NO: 158 and a light chain comprising the amino acid sequence of SEQ ID NO: 157.

[0192] In some embodiments, the anti-TfR1 antibody of the present disclosure comprises a heavy chain comprising the amino acid sequence of SEQ ID NO: 159 and a light chain comprising the amino acid sequence of SEQ ID NO: 157.

### Other Known Anti-TfR1 Antibodies

[0193] Any other appropriate anti-TfR1 antibodies known in the art may be used as the muscle-targeting agent in the complexes disclosed herein. Examples of known anti-TfR1 antibodies, including associated references and binding epitopes, are listed in Table 6. In some embodiments, the anti-TfR1 antibody comprises the complementarity determining regions (CDR-H1, CDR-H2, CDR-H3, CDR-L1, CDR-L2, and CDR-L3) of any of the anti-TfR1 antibodies provided herein, e.g., anti-TfR1 antibodies listed in Table 6.

TABLE 6
List of anti-TfR1 antibody clones, including associated
references and binding epitope information.

| Antibody Clone | | |
|---|---|---|
| Name | Reference(s) | Epitope/Notes |
| OKT9 | U.S. Pat. No. 4,364,934, filed Dec. 4, 1979, | Apical domain of TfR1 |
| | entitled “MONOCLONAL ANTIBODY TO | (residues 305-366 of |
| | A HUMAN EARLY THYMOCYTE | human TfR1 sequence |
| | ANTIGEN AND METHODS FOR | XM_052730.3, available |
| | PREPARING SAME” | in GenBank) |
| | Schneider C. et al. “Structural features of the | |
| | cell surface receptor for transferrin that is | |
| | recognized by the monoclonal antibody | |
| | OKT9.” J Biol Chem. 1982, 257: 14, 8516- | |
| | 8522. | |
| (From JCR) | WO 2015/098989, filed Dec. 24, 2014, | Apical domain (residues |
| Clone M11 | “Novel anti-Transferrin receptor antibody | 230-244 and 326-347 of |
| Clone M23 | that passes through blood-brain barrier” | TfR1) and protease-like |
| Clone M27 | U.S. Pat. No. 9,994,641, filed | domain (residues 461- |
| Clone B84 | Dec. 24, 2014, “Novel anti-Transferrin | 473) |
| | receptor antibody that passes through | |
| | blood-brain barrier” | |
| (From | WO 2016/081643, filed May 26, 2016, | Apical domain and non- |
| Genentech) | entitled “ANTI-TRANSFERRIN | apical regions |
| 7A4, 8A2, 15D2, | RECEPTOR ANTIBODIES AND | |
| 10D11, 7B10, | METHODS OF USE” | |
| 15G11, 16G5, | U.S. Pat. No. 9,708,406, filed | |
| 13C3, 16G4, | May 20, 2014, “Anti-transferrin receptor | |
| 16F6, 7G7, 4C2, | antibodies and methods of use” | |
| 1B12, and 13D4 | | |
| (From Armagen) | Lee et al. “Targeting Rat Anti-Mouse | |
| 8D3 | Transferrin Receptor Monoclonal Antibodies | |
| | through Blood-Brain Barrier in Mouse” | |
| | 2000, J Pharmacol. Exp. Ther., 292: 1048- | |
| | 1052. | |
| | US Patent App. 2010/077498, filed | |
| | Sep. 11, 2008, entitled “COMPOSITIONS AND | |
| | METHODS FOR BLOOD-BRAIN | |
| | BARRIER DELIVERY IN THE MOUSE” | |
| OX26 | Haobam, B. et al. 2014. Rab17- | |
| | mediated recycling endosomes contribute to | |
| | autophagosome formation in response to | |
| | Group A Streptococcus invasion. Cellular | |
| | microbiology. 16: 1806-21. | |
| DF1513 | Ortiz-Zapater E et al. Trafficking of | |
| | the human transferrin receptor in plant cells: | |
| | effects of tyrphostin A23 and brefeldin A. | |
| | Plant J 48: 757-70 (2006). | |
| 1A1B2, 66IG10, | Commercially available anti- | Novus Biologicals |
| MEM-189, | transferrin receptor antibodies. | 8100 Southpark Way, A- |
| JF0956, 29806, | | 8 Littleton CO 80120 |
| 1A1B2, | | |
| TFRC/1818, | | |
| 1E6, 66Ig10, | | |
| TFRC/1059, | | |
| Q1/71, 23D10, | | |
| 13E4, | | |
| TFRC/1149, ER- | | |
| MP21, | | |
| YTA74.4, BU54, | | |
| 2B6, RI7 217 | | |
| (From INSERM) | US Patent App. 2011/0311544A1, | Does not compete with |
| BA120g | filed Jun. 15, 2005, entitled “ANTI-CD71 | OKT9 |
| | MONOCLONAL ANTIBODIES AND | |
| | USES THEREOF FOR TREATING | |
| | MALIGNANT TUMOR CELLS” | |
| LUCA31 | U.S. Pat. No. 7,572,895, filed | “LUCA31 epitope” |
| | Jun. 7, 2004, entitled “TRANSFERRIN | |
| | RECEPTOR ANTIBODIES” | |
| (Salk Institute) | Trowbridge, I. S. et al. “Anti-transferrin | |
| B3/25 | receptor monoclonal antibody and toxin- | |
| T58/30 | antibody conjugates affect growth of | |
| | human tumour cells.” Nature, 1981, | |
| | volume 294, pages 171-173 | |
| R17 217.1.3, | Commercially available anti- | BioXcell |
| 5E9C11, | transferrin receptor antibodies. | 10 Technology Dr., Suite |
| OKT9 (BE0023 | | 2B |
| clone) | | West Lebanon, NH |
| | | 03784-1671 USA |
| BK19.9, B3/25, | Gatter, K. C. et al. “Transferrin receptors | |
| T56/14 and | in human tissues: their distribution and | |
| T58/1 | possible clinical relevance.” J Clin | |
| | Pathol. 1983 May; 36(5): 539-45. | |

| | Additional Anti-TfR1 antibody SEQ ID NOs | | | | |
|---|---|---|---|---|---|
| Anto-TfR1 antibody | | VH/VL | CDR1 | CDR2 | CDR3 |
| CDRH1 (SEQ ID NO: 2179) | VH1 | 2194 | 2187 | 2188 | 2181 |
| CDRH2 (SEQ ID NO: 2180) | VH2 | 2195 | 2187 | 2189 | 2181 |
| CDRH3 (SEQ ID NO: 2181) | VH3 | 2196 | 2187 | 2190 | 2181 |
| CDRL1 (SEQ ID NO: 2182) | VH4 | 2197 | 2187 | 2189 | 2181 |
| CDRL2 (SEQ ID NO: 2183) | VL1 | 2198 | 2182 | 2183 | 115 |
| CDRL3 (SEQ ID NO: 2184) | VL2 | 2199 | 2182 | 2183 | 115 |
| VH (SEQ ID NO: 2185) | VL3 | 2200 | 2182 | 2191 | 2184 |
| VL (SEQ ID NO: 2186) | VL4 | 2201 | 2182 | 2193 | 2184 |

[0194] In some embodiments, anti-TfR1 antibodies of the present disclosure include one or more of the CDR-H (e.g., CDR-H1, CDR-H-2, and CDR-H3) amino acid sequences from any one of the anti-TfR1 antibodies selected from Table 6. In some embodiments, anti-TfR1 antibodies include the CDR-L1, CDR-L2, and CDR-L3 as provided for any one of the anti-TfR1 antibodies selected from Table 6. In some embodiments, anti-TfR1 antibodies include the CDR-H1, CDR-H2, CDR-H-3, CDR-L1, CDR-L2, and CDR-L3 as provided for any one of the anti-TfR1 antibodies selected from Table 6.

[0195] In some embodiments, anti-TfR1 antibodies of the disclosure include any antibody that includes a heavy chain variable domain and/or (e.g., and) a light chain variable domain of any anti-TfR1 antibody, such as any one of the anti-TfR1 antibodies selected from Table 6. In some embodiments, anti-TfR1 antibodies of the disclosure include any antibody that includes the heavy chain variable and light chain variable pairs of any anti-TfR1 antibody, such as any one of the anti-TfR1 antibodies selected from Table 6.

[0196] Aspects of the disclosure provide anti-TfR1 antibodies having a heavy chain variable (VH) and/or (e.g., and) a light chain variable (VL) domain amino acid sequence homologous to any of those described herein. In some embodiments, the anti-TfR1 antibody comprises a heavy chain variable sequence or a light chain variable sequence that is at least 75% (e.g., 80%, 85%, 90%, 95%, 98%, or 99%) identical to the heavy chain variable sequence and/or any light chain variable sequence of any anti-TfR1 antibody, such as any one of the anti-TfR1 antibodies selected from Table 6. In some embodiments, the homologous heavy chain variable and/or (e.g., and) a light chain variable amino acid sequences do not vary within any of the CDR sequences provided herein. For example, in some embodiments, the degree of sequence variation (e.g., 75%, 80%, 85%, 90%, 95%, 98%, or 99%) may occur within a heavy chain variable and/or (e.g., and) a light chain variable sequence excluding any of the CDR sequences provided herein. In some embodiments, any of the anti-TfR1 antibodies provided herein comprise a heavy chain variable sequence and a light chain variable sequence that comprises a framework sequence that is at least 75%, 80%, 85%, 90%, 95%, 98%, or 99% identical to the framework sequence of any anti-TfR1 antibody, such as any one of the anti-TfR1 antibodies selected from Table 6.

[0197] An example of a transferrin receptor antibody that may be used in accordance with the present disclosure is described in International Application Publication WO 2016/081643, incorporated herein by reference. The amino acid sequences of this antibody are provided in Table 7.

TABLE 7
Heavy chain and light chain CDRs of an example of a known anti-TfR1 antibody

| Sequence Type | Kabat | Chothia | Contact |
|---|---|---|---|
| CDR-H1 | SYWMH (SEQ ID | GYTFTSY (SEQ ID NO: 116) | TSYWMH (SEQ ID NO: 118) |
| | NO: 110) | | |
| CDR-H2 | EINPTNGRTNYIE | NPTNGR (SEQ ID NO: 117) | WIGEINPTNGRTN (SEQ ID |
| | KFKS (SEQ ID | | NO: 119) |
| | NO: 111) | | |
| CDR-H3 | GTRAYHY (SEQ | GTRAYHY (SEQ ID NO: | ARGTRA (SEQ ID NO: 120) |
| | ID NO: 112) | 112) | |
| CDR-L1 | RASDNLYSNLA | RASDNLYSNLA (SEQ ID | YSNLAWY (SEQ ID NO: 121) |
| | (SEQ ID NO: 113) | NO: 113) | |
| CDR-L2 | DATNLAD (SEQ | DATNLAD (SEQ ID NO: | LLVYDATNLA (SEQ ID NO: |
| | ID NO: 114) | 114) | 122) |
| CDR-L3 | QHFWGTPLT | QHFWGTPLT (SEQ ID NO: | QHFWGTPL (SEQ ID NO: |
| | (SEQ ID NO: 115) | 115) | 123) |

| | |
|---|---|
| Murine VH | QVQLQQPGAELVKPGASVKLSCKASGYTFTSYWMHWVKQRPGQGLEWIGEINP |
| | TNGRTNYIEKFKSKATLTVDKSSSTAYMQLSSLTSEDSAVYYCARGTRAYHYW |
| | GQGTSVTVSS (SEQ ID NO: 124) |
| Murine VL | DIQMTQSPASLSVSVGETVTITCRASDNLYSNLAWYQQKQGKSPQLLVYDATNL |
| | ADGVPSRFSGSGSGTQYSLKINSLQSEDFGTYYCQHFWGTPLTFGAGTKLELK |
| | (SEQ ID NO: 125) |
| Humanized VH | EVQLVQSGAEVKKPGASVKVSCKASGYTFTSYWMHWVRQAPGQRLEWIGEIN |
| | PTNGRTNYIEKFKSRATLTVDKSASTAYMELSSLRSEDTAVYYCARGTRAYHY |
| | WGQGTMVTVSS (SEQ ID NO: 128) |
| Humanized VL | DIQMTQSPSSLSASVGDRVTITCRASDNLYSNLAWYQQKPGKSPKLLVYDATNL |
| | ADGVPSRFSGSGSGTDYTLTISSLQPEDFATYYCQHFWGTPLTFGQGTKVEIK |
| | (SEQ ID NO: 129) |
| HC of chimeric | QVQLQQPGAELVKPGASVKLSCKASGYTFTSYWMHWVKQRPGQGLEWIGEINP |
| full-length IgG1 | TNGRTNYIEKFKSKATLTVDKSSSTAYMQLSSLTSEDSAVYYCARGTRAYHYW |
| | GQGTSVTVSSASTKGPSVFPLAPSSKSTSGGTAALGCLVKDYFPEPVTVSWNSG |
| | ALTSGVHTFPAVLQSSGLYSLSSVVTVPSSSLGTQTYICNVNHKPSNTKVDKKVE |
| | PKSCDKTHTCPPCPAPELLGGPSVFLFPPKPKDTLMISRTPEVTCVVVDVSHEDPE |
| | VKFNWYVDGVEVHNAKTKPREEQYNSTYRVVSVLTVLHQDWLNGKEYKCKV |
| | SNKALPAPIEKTISKAKGQPREPQVYTLPPSRDELTKNQVSLTCLVKGFYPSDIAV |
| | EWESNGQPENNYKTTPPVLDSDGSFFLYSKLTVDKSRWQQGNVFSCSVMHEAL |
| | HNHYTQKSLSLSPGK (SEQ ID NO: 132) |
| LC of chimeric | DIQMTQSPASLSVSVGETVTITCRASDNLYSNLAWYQQKQGKSPQLLVYDATNL |
| full-length IgG1 | ADGVPSRFSGSGSGTQYSLKINSLQSEDFGTYYCQHFWGTPLTFGAGTKLELKR |
| | TVAAPSVFIFPPSDEQLKSGTASVVCLLNNFYPREAKVQWKVDNALQSGNSQES |
| | VTEQDSKDSTYSLSSTLTLSKADYEKHKVYACEVTHQGLSSPVTKSFNRGEC |
| | (SEQ ID NO: 133) |
| HC of fully human | EVQLVQSGAEVKKPGASVKVSCKASGYTFTSYWMHWVRQAPGQRLEWIGEIN |
| full-length IgG1 | PTNGRTNYIEKFKSRATLTVDKSASTAYMELSSLRSEDTAVYYCARGTRAYHY |
| | WGQGTMVTVSSASTKGPSVFPLAPSSKSTSGGTAALGCLVKDYFPEPVTVSWNS |
| | GALTSGVHTFPAVLQSSGLYSLSSVVTVPSSSLGTQTYICNVNHKPSNTKVDKKV |
| | EPKSCDKTHTCPPCPAPELLGGPSVFLFPPKPKDTLMISRTPEVTCVVVDVSHEDP |
| | EVKFNWYVDGVEVHNAKTKPREEQYNSTYRVVSVLTVLHQDWLNGKEYKCK |
| | VSNKALPAPIEKTISKAKGQPREPQVYTLPPSRDELTKNQVSLTCLVKGFYPSDIA |
| | VEWESNGQPENNYKTTPPVLDSDGSFFLYSKLTVDKSRWQQGNVFSCSVMHEA |
| | LHNHYTQKSLSLSPGK (SEQ ID NO: 134) |
| LC of fully human | DIQMTQSPSSLSASVGDRVTITCRASDNLYSNLAWYQQKPGKSPKLLVYDATNL |
| full-length IgG1 | ADGVPSRFSGSGSGTDYTLTISSLQPEDFATYYCQHFWGTPLTFGQGTKVEIKRT |
| | VAAPSVFIFPPSDEQLKSGTASVVCLLNNFYPREAKVQWKVDNALQSGNSQESV |
| | TEQDSKDSTYSLSSTLTLSKADYEKHKVYACEVTHQGLSSPVTKSFNRGEC |
| | (SEQ ID NO: 135) |
| HC of chimeric | QVQLQQPGAELVKPGASVKLSCKASGYTFTSYWMHWVKQRPGQGLEWIGEINP |
| Fab | TNGRTNYIEKFKSKATLTVDKSSSTAYMQLSSLTSEDSAVYYCARGTRAYHYW |
| | GQGTSVTVSSASTKGPSVFPLAPSSKSTSGGTAALGCLVKDYFPEPVTVSWNSG |
| | ALTSGVHTFPAVLQSSGLYSLSSVVTVPSSSLGTQTYICNVNHKPSNTKVDKKVE |
| | PKSCDKTHTCP (SEQ ID NO: 136) |
| HC of fully human | EVQLVQSGAEVKKPGASVKVSCKASGYTFTSYWMHWVRQAPGQRLEWIGEIN |
| Fab | PTNGRTNYIEKFKSRATLTVDKSASTAYMELSSLRSEDTAVYYCARGTRAYHY |
| | WGQGTMVTVSSASTKGPSVFPLAPSSKSTSGGTAALGCLVKDYFPEPVTVSWNS |
| | GALTSGVHTFPAVLQSSGLYSLSSVVTVPSSSLGTQTYICNVNHKPSNTKVDKKV |
| | EPKSCDKTHTCP (SEQ ID NO: 137) |

[0198] In some embodiments, the anti-TfR1 antibody of the present disclosure comprises a CDR-H1, a CDR-H2, and a CDR-H3 that are the same as the CDR-H1, CDR-H2, and CDR-H3 shown in Table 7. Alternatively or in addition (e.g., in addition), the anti-TfR1 antibody of the present disclosure comprises a CDR-L1, a CDR-L2, and a CDR-L3 that are the same as the CDR-L1, CDR-L2, and CDR-L3 shown in Table 7.

[0199] In some embodiments, the anti-TfR1 antibody of the present disclosure comprises a CDR-L3, which contains no more than 3 amino acid variations (e.g., no more than 3, 2, or 1 amino acid variation) as compared with the CDR-L3 as shown in Table 7. In some embodiments, the anti-TfR1 antibody of the present disclosure comprises a CDR-L3 containing one amino acid variation as compared with the CDR-L3 as shown in Table 7. In some embodiments, the anti-TfR1 antibody of the present disclosure comprises a CDR-L3 of QHFAGTPLT (SEQ ID NO: 126) (according to the Kabat and Chothia definition system) or QHFAGTPL (SEQ ID NO: 127) (according to the Contact definition system). In some embodiments, the anti-TfR1 antibody of the present disclosure comprises a CDR-H1, a CDR-H2, a CDR-H3, a CDR-L1 and a CDR-L2 that are the same as the CDR-H1, CDR-H2, and CDR-H3 shown in Table 7, and comprises a CDR-L3 of QHFAGTPLT (SEQ ID NO: 126) (according to the Kabat and Chothia definition system) or QHFAGTPL (SEQ ID NO: 127) (according to the Contact definition system).

[0200] In some embodiments, the anti-TfR1 antibody of the present disclosure comprises heavy chain CDRs that collectively are at least 80% (e.g., 80%, 85%, 90%, 95%, or 98%) identical to the heavy chain CDRs as shown in Table 7. Alternatively or in addition (e.g., in addition), the anti-TfR1 antibody of the present disclosure comprises light chain CDRs that collectively are at least 80% (e.g., 80%, 85%, 90%, 95%, or 98%) identical to the light chain CDRs as shown in Table 7.

[0201] In some embodiments, the anti-TfR1 antibody of the present disclosure comprises a VH comprising the amino acid sequence of SEQ ID NO: 124. Alternatively or in addition (e.g., in addition), the anti-TfR1 antibody of the present disclosure comprises a VL comprising the amino acid sequence of SEQ ID NO: 125.

[0202] In some embodiments, the anti-TfR1 antibody of the present disclosure comprises a VH comprising the amino acid sequence of SEQ ID NO: 128. Alternatively or in addition (e.g., in addition), the anti-TfR1 antibody of the present disclosure comprises a VL comprising the amino acid sequence of SEQ ID NO: 129.

[0203] In some embodiments, the anti-TfR1 antibody of the present disclosure comprises a VH containing no more than 25 amino acid variations (e.g., no more than 25, 24, 23, 22, 21, 20, 19, 18, 17, 16, 15, 14, 13, 12, 11, 10, 9, 8, 7, 6, 5, 4, 3, 2, or 1 amino acid variation) as compared with the VH as set forth in SEQ ID NO: 128. Alternatively or in addition (e.g., in addition), the anti-TfR1 antibody of the present disclosure comprises a VL containing no more than 15 amino acid variations (e.g., no more than 20, 19, 18, 17, 16, 15, 14, 13, 12, 11, 9, 8, 7, 6, 5, 4, 3, 2, or 1 amino acid variation) as compared with the VL as set forth in SEQ ID NO: 129.

[0204] In some embodiments, the anti-TfR1 antibody of the present disclosure is a full-length IgG1 antibody, which can include a heavy constant region and a light constant region from a human antibody. In some embodiments, the heavy chain of any of the anti-TfR1 antibodies as described herein may comprises a heavy chain constant region (CH) or a portion thereof (e.g., CH1, CH2, CH3, or a combination thereof). The heavy chain constant region can of any suitable origin, e.g., human, mouse, rat, or rabbit. In one specific example, the heavy chain constant region is from a human IgG (a gamma heavy chain), e.g., IgG1, IgG2, or IgG4. An example of human IgG1 constant region is given below:

(SEQ ID NO: 81)
[sequence omitted]

[0205] In some embodiments, the light chain of any of the anti-TfR1 antibodies described herein may further comprise a light chain constant region (CL), which can be any CL known in the art. In some examples, the CL is a kappa light chain. In other examples, the CL is a lambda light chain. In some embodiments, the CL is a kappa light chain, the sequence of which is provided below:

(SEQ ID NO: 83)
RTVAAPSVFIFPPSDEQLKSGTASVVCLLNNFYPREAKVQWKVDNALQSG
NSQESVTEQDSKDSTYSLSSTLTLSKADYEKHKVYACEVTHQGLSSPVTK
SFNRGEC

[0206] In some embodiments, the anti-TfR1 antibody described herein is a chimeric antibody that comprises a heavy chain comprising the amino acid sequence of SEQ ID NO: 132. Alternatively or in addition (e.g., in addition), the anti-TfR1 antibody described herein comprises a light chain comprising the amino acid sequence of SEQ ID NO: 133.

[0207] In some embodiments, the anti-TfR1 antibody described herein is a fully human antibody that comprises a heavy chain comprising the amino acid sequence of SEQ ID NO: 134. Alternatively or in addition (e.g., in addition), the anti-TfR1 antibody described herein comprises a light chain comprising the amino acid sequence of SEQ ID NO: 135.

[0208] In some embodiments, the anti-TfR1 antibody is an antigen binding fragment (Fab) of an intact antibody (full-length antibody). In some embodiments, the anti-TfR1 Fab described herein comprises a heavy chain comprising the amino acid sequence of SEQ ID NO: 136. Alternatively or in addition (e.g., in addition), the anti-TfR1 Fab described herein comprises a light chain comprising the amino acid sequence of SEQ ID NO: 133. In some embodiments, the anti-TfR1 Fab described herein comprises a heavy chain comprising the amino acid sequence of SEQ ID NO: 137. Alternatively or in addition (e.g., in addition), the anti-TfR1 Fab described herein comprises a light chain comprising the amino acid sequence of SEQ ID NO: 135.

[0209] The anti-TfR1 antibodies described herein can be in any antibody form, including, but not limited to, intact (i.e., full-length) antibodies, antigen-binding fragments thereof (such as Fab, Fab′, F(ab′)2, Fv), single chain antibodies, bi-specific antibodies, or nanobodies. In some embodiments, the anti-TfR1 antibody described herein is an scFv. In some embodiments, the anti-TfR1 antibody described herein is an scFv-Fab (e.g., scFv fused to a portion of a constant region). In some embodiments, the anti-TfR1 antibody described herein is an scFv fused to a constant region (e.g., human IgG1 constant region as set forth in SEQ ID NO: 81).

[0210] In some embodiments, conservative mutations can be introduced into antibody sequences (e.g., CDRs or framework sequences) at positions where the residues are not likely to be involved in interacting with a target antigen (e.g., transferrin receptor), for example, as determined based on a crystal structure. In some embodiments, one, two or more mutations (e.g., amino acid substitutions) are introduced into the Fc region of an anti-TfR1 antibody described herein (e.g., in a CH2 domain (residues 231-340 of human IgG1) and/or (e.g., and) CH3 domain (residues 341-447 of human IgG1) and/or (e.g., and) the hinge region, with numbering according to the Kabat numbering system (e.g., the EU index in Kabat)) to alter one or more functional properties of the antibody, such as serum half-life, complement fixation, Fc receptor binding and/or (e.g., and) antigen-dependent cellular cytotoxicity.

[0211] In some embodiments, one, two or more mutations (e.g., amino acid substitutions) are introduced into the hinge region of the Fc region (CH1 domain) such that the number of cysteine residues in the hinge region are altered (e.g., increased or decreased) as described in, e.g., U.S. Pat. No. 5,677,425. The number of cysteine residues in the hinge region of the CH1 domain can be altered to, e.g., facilitate assembly of the light and heavy chains, or to alter (e.g., increase or decrease) the stability of the antibody or to facilitate linker conjugation.

[0212] In some embodiments, one, two or more mutations (e.g., amino acid substitutions) are introduced into the Fc region of a muscle-targeting antibody described herein (e.g., in a CH2 domain (residues 231-340 of human IgG1) and/or (e.g., and) CH3 domain (residues 341-447 of human IgG1) and/or (e.g., and) the hinge region, with numbering according to the Kabat numbering system (e.g., the EU index in Kabat)) to increase or decrease the affinity of the antibody for an Fc receptor (e.g., an activated Fc receptor) on the surface of an effector cell. Mutations in the Fc region of an antibody that decrease or increase the affinity of an antibody for an Fc receptor and techniques for introducing such mutations into the Fc receptor or fragment thereof are known to one of skill in the art. Examples of mutations in the Fc receptor of an antibody that can be made to alter the affinity of the antibody for an Fc receptor are described in, e.g., Smith P et al., (2012) PNAS 109: 6181-6186, U.S. Pat. No. 6,737,056, and International Publication Nos. WO 02/060919; WO 98/23289; and WO 97/34631, which are incorporated herein by reference.

[0213] In some embodiments, one, two or more amino acid mutations (i.e., substitutions, insertions or deletions) are introduced into an IgG constant domain, or FcRn-binding fragment thereof (preferably an Fc or hinge-Fc domain fragment) to alter (e.g., decrease or increase) half-life of the antibody in vivo. See, e.g., International Publication Nos. WO 02/060919; WO 98/23289; and WO 97/34631; and U.S. Pat. Nos. 5,869,046, 6,121,022, 6,277,375 and 6,165,745 for examples of mutations that will alter (e.g., decrease or increase) the half-life of an antibody in vivo.

[0214] In some embodiments, one, two or more amino acid mutations (i.e., substitutions, insertions or deletions) are introduced into an IgG constant domain, or FcRn-binding fragment thereof (preferably an Fc or hinge-Fc domain fragment) to decrease the half-life of the anti-TfR1 antibody in vivo. In some embodiments, one, two or more amino acid mutations (i.e., substitutions, insertions or deletions) are introduced into an IgG constant domain, or FcRn-binding fragment thereof (preferably an Fc or hinge-Fc domain fragment) to increase the half-life of the antibody in vivo. In some embodiments, the antibodies can have one or more amino acid mutations (e.g., substitutions) in the second constant (CH2) domain (residues 231-340 of human IgG1) and/or (e.g., and) the third constant (CH3) domain (residues 341-447 of human IgG1), with numbering according to the EU index in Kabat (Kabat E A et al., (1991) supra). In some embodiments, the constant region of the IgG1 of an antibody described herein comprises a methionine (M) to tyrosine (Y) substitution in position 252, a serine (S) to threonine (T) substitution in position 254, and a threonine (T) to glutamic acid (E) substitution in position 256, numbered according to the EU index as in Kabat. See U.S. Pat. No. 7,658,921, which is incorporated herein by reference. This type of mutant IgG, referred to as “YTE mutant” has been shown to display fourfold increased half-life as compared to wild-type versions of the same antibody (see Dall′Acqua W F et al., (2006) J Biol Chem 281: 23514-24). In some embodiments, an antibody comprises an IgG constant domain comprising one, two, three or more amino acid substitutions of amino acid residues at positions 251-257, 285-290, 308-314, 385-389, and 428-436, numbered according to the EU index as in Kabat.

[0215] In some embodiments, one, two or more amino acid substitutions are introduced into an IgG constant domain Fc region to alter the effector function(s) of the anti-TfR1 antibody. The effector ligand to which affinity is altered can be, for example, an Fc receptor or the C1 component of complement. This approach is described in further detail in U.S. Pat. Nos. 5,624,821 and 5,648,260. In some embodiments, the deletion or inactivation (through point mutations or other means) of a constant region domain can reduce Fc receptor binding of the circulating antibody thereby increasing tumor localization. See, e.g., U.S. Pat. Nos. 5,585,097 and 8,591,886 for a description of mutations that delete or inactivate the constant domain and thereby increase tumor localization. In some embodiments, one or more amino acid substitutions may be introduced into the Fc region of an antibody described herein to remove potential glycosylation sites on Fc region, which may reduce Fc receptor binding (see, e.g., Shields R L et al., (2001) J Biol Chem 276: 6591-604).

[0216] In some embodiments, one or more amino in the constant region of an anti-TfR1 antibody described herein can be replaced with a different amino acid residue such that the antibody has altered C1q binding and/or (e.g., and) reduced or abolished complement dependent cytotoxicity (CDC). This approach is described in further detail in U.S. Pat. No. 6,194,551 (Idusogie et al). In some embodiments, one or more amino acid residues in the N-terminal region of the CH2 domain of an antibody described herein are altered to thereby alter the ability of the antibody to fix complement. This approach is described further in International Publication No. WO 94/29351. In some embodiments, the Fc region of an antibody described herein is modified to increase the ability of the antibody to mediate antibody dependent cellular cytotoxicity (ADCC) and/or (e.g., and) to increase the affinity of the antibody for an Fcγ receptor. This approach is described further in International Publication No. WO 00/42072.

[0217] In some embodiments, the heavy and/or (e.g., and) light chain variable domain(s) sequence(s) of the antibodies provided herein can be used to generate, for example, CDR-grafted, chimeric, humanized, or composite human antibodies or antigen-binding fragments, as described elsewhere herein. As understood by one of ordinary skill in the art, any variant, CDR-grafted, chimeric, humanized, or composite antibodies derived from any of the antibodies provided herein may be useful in the compositions and methods described herein and will maintain the ability to specifically bind transferrin receptor, such that the variant, CDR-grafted, chimeric, humanized, or composite antibody has at least 50%, at least 60%, at least 70%, at least 80%, at least 90%, at least 95% or more binding to transferrin receptor relative to the original antibody from which it is derived.

[0218] In some embodiments, the antibodies provided herein comprise mutations that confer desirable properties to the antibodies. For example, to avoid potential complications due to Fab-arm exchange, which is known to occur with native IgG4 mAbs, the antibodies provided herein may comprise a stabilizing ‘Adair’ mutation (Angal S., et al., “A single amino acid substitution abolishes the heterogeneity of chimeric mouse/human (IgG4) antibody,” Mol Immunol 30, 105-108; 1993), where serine 228 (EU numbering; residue 241 Kabat numbering) is converted to proline resulting in an IgG1-like hinge sequence. Accordingly, any of the antibodies may include a stabilizing ‘Adair’ mutation.

[0219] In some embodiments, an antibody is modified, e.g., modified via glycosylation, phosphorylation, sumoylation, and/or (e.g., and) methylation. In some embodiments, an antibody is a glycosylated antibody, which is conjugated to one or more sugar or carbohydrate molecules. In some embodiments, the one or more sugar or carbohydrate molecule are conjugated to the antibody via N-glycosylation, O-glycosylation, C-glycosylation, glypiation (GPI anchor attachment), and/or (e.g., and) phosphoglycosylation. In some embodiments, the one or more sugar or carbohydrate molecules are monosaccharides, disaccharides, oligosaccharides, or glycans. In some embodiments, the one or more sugar or carbohydrate molecule is a branched oligosaccharide or a branched glycan. In some embodiments, the one or more sugar or carbohydrate molecule includes a mannose unit, a glucose unit, an N-acetylglucosamine unit, an N-acetylgalactosamine unit, a galactose unit, a fucose unit, or a phospholipid unit. In some embodiments, there are about 1-10, about 1-5, about 5-10, about 1-4, about 1-3, or about 2 sugar molecules. In some embodiments, a glycosylated antibody is fully or partially glycosylated. In some embodiments, an antibody is glycosylated by chemical reactions or by enzymatic means. In some embodiments, an antibody is glycosylated in vitro or inside a cell, which may optionally be deficient in an enzyme in the N- or O-glycosylation pathway, e.g. a glycosyltransferase. In some embodiments, an antibody is functionalized with sugar or carbohydrate molecules as described in International Patent Application Publication WO2014065661, published on May 1, 2014, entitled, “Modified antibody, antibody-conjugate and process for the preparation thereof”.

[0220] In some embodiments, any one of the anti-TfR1 antibodies described herein may comprise a signal peptide in the heavy and/or (e.g., and) light chain sequence (e.g., a N-terminal signal peptide). In some embodiments, the anti-TfR1 antibody described herein comprises any one of the VH and VL sequences, any one of the IgG heavy chain and light chain sequences, or any one of the F(ab′) heavy chain and light chain sequences described herein, and further comprises a signal peptide (e.g., a N-terminal signal peptide). In some embodiments, the signal peptide comprises the amino acid sequence of MGWSCIILFLVATATGVHS (SEQ ID NO: 104).

[0221] In some embodiments, an antibody provided herein may have one or more post-translational modifications. In some embodiments, N-terminal cyclization, also called pyroglutamate formation (pyro-Glu), may occur in the antibody at N-terminal Glutamate (Glu) and/or Glutamine (Gln) residues during production. As such, it should be appreciated that an antibody specified as having a sequence comprising an N-terminal glutamate or glutamine residue encompasses antibodies that have undergone pyroglutamate formation resulting from a post-translational modification. In some embodiments, pyroglutamate formation occurs in a heavy chain sequence. In some embodiments, pyroglutamate formation occurs in a light chain sequence.

b. Other Muscle-Targeting Antibodies

[0222] In some embodiments, the muscle-targeting antibody is an antibody that specifically binds hemojuvelin, caveolin-3, Duchenne muscular dystrophy peptide, myosin IIb or CD63. In some embodiments, the muscle-targeting antibody is an antibody that specifically binds a myogenic precursor protein. Exemplary myogenic precursor proteins include, without limitation, ABCG2, M-Cadherin/Cadherin-15, Caveolin-1, CD34, FoxK1, Integrin alpha 7, Integrin alpha 7 beta 1, MYF-5, MyoD, Myogenin, NCAM-1/CD56, Pax3, Pax7, and Pax9. In some embodiments, the muscle-targeting antibody is an antibody that specifically binds a skeletal muscle protein. Exemplary skeletal muscle proteins include, without limitation, alpha-Sarcoglycan, beta-Sarcoglycan, Calpain Inhibitors, Creatine Kinase MM/CKMM, eIF5A, Enolase 2/Neuron-specific Enolase, epsilon-Sarcoglycan, FABP3/H-FABP, GDF-8/Myostatin, GDF-11/GDF-8, Integrin alpha 7, Integrin alpha 7 beta 1, Integrin beta 1/CD29, MCAM/CD146, MyoD, Myogenin, Myosin Light Chain Kinase Inhibitors, NCAM-1/CD56, and Troponin I. In some embodiments, the muscle-targeting antibody is an antibody that specifically binds a smooth muscle protein. Exemplary smooth muscle proteins include, without limitation, alpha-Smooth Muscle Actin, VE-Cadherin, Caldesmon/CALD1, Calponin 1, Desmin, Histamine H2 R, Motilin R/GPR38, Transgelin/TAGLN, and Vimentin. However, it should be appreciated that antibodies to additional targets are within the scope of this disclosure and the exemplary lists of targets provided herein are not meant to be limiting.

c. Antibody Features/Alterations

[0223] In some embodiments, conservative mutations can be introduced into antibody sequences (e.g., CDRs or framework sequences) at positions where the residues are not likely to be involved in interacting with a target antigen (e.g., transferrin receptor), for example, as determined based on a crystal structure. In some embodiments, one, two or more mutations (e.g., amino acid substitutions) are introduced into the Fc region of a muscle-targeting antibody described herein (e.g., in a CH2 domain (residues 231-340 of human IgG1) and/or (e.g., and) CH3 domain (residues 341-447 of human IgG1) and/or (e.g., and) the hinge region, with numbering according to the Kabat numbering system (e.g., the EU index in Kabat)) to alter one or more functional properties of the antibody, such as serum half-life, complement fixation, Fc receptor binding and/or (e.g., and) antigen-dependent cellular cytotoxicity.

[0224] In some embodiments, one, two or more mutations (e.g., amino acid substitutions) are introduced into the hinge region of the Fc region (CH1 domain) such that the number of cysteine residues in the hinge region are altered (e.g., increased or decreased) as described in, e.g., U.S. Pat. No. 5,677,425. The number of cysteine residues in the hinge region of the CH1 domain can be altered to, e.g., facilitate assembly of the light and heavy chains, or to alter (e.g., increase or decrease) the stability of the antibody or to facilitate linker conjugation.

[0225] In some embodiments, one, two or more mutations (e.g., amino acid substitutions) are introduced into the Fc region of a muscle-targeting antibody described herein (e.g., in a CH2 domain (residues 231-340 of human IgG1) and/or (e.g., and) CH3 domain (residues 341-447 of human IgG1) and/or (e.g., and) the hinge region, with numbering according to the Kabat numbering system (e.g., the EU index in Kabat)) to increase or decrease the affinity of the antibody for an Fc receptor (e.g., an activated Fc receptor) on the surface of an effector cell. Mutations in the Fc region of an antibody that decrease or increase the affinity of an antibody for an Fc receptor and techniques for introducing such mutations into the Fc receptor or fragment thereof are known to one of skill in the art. Examples of mutations in the Fc receptor of an antibody that can be made to alter the affinity of the antibody for an Fc receptor are described in, e.g., Smith P et al., (2012) PNAS 109: 6181-6186, U.S. Pat. No. 6,737,056, and International Publication Nos. WO 02/060919; WO 98/23289; and WO 97/34631, which are incorporated herein by reference.

[0226] In some embodiments, one, two or more amino acid mutations (i.e., substitutions, insertions or deletions) are introduced into an IgG constant domain, or FcRn-binding fragment thereof (preferably an Fc or hinge-Fc domain fragment) to alter (e.g., decrease or increase) half-life of the antibody in vivo. See, e.g., International Publication Nos. WO 02/060919; WO 98/23289; and WO 97/34631; and U.S. Pat. Nos. 5,869,046, 6,121,022, 6,277,375 and 6,165,745 for examples of mutations that will alter (e.g., decrease or increase) the half-life of an antibody in vivo.

[0227] In some embodiments, one, two or more amino acid mutations (i.e., substitutions, insertions or deletions) are introduced into an IgG constant domain, or FcRn-binding fragment thereof (preferably an Fc or hinge-Fc domain fragment) to decrease the half-life of the anti-transferrin receptor antibody in vivo. In some embodiments, one, two or more amino acid mutations (i.e., substitutions, insertions or deletions) are introduced into an IgG constant domain, or FcRn-binding fragment thereof (preferably an Fc or hinge-Fc domain fragment) to increase the half-life of the antibody in vivo. In some embodiments, the antibodies can have one or more amino acid mutations (e.g., substitutions) in the second constant (CH2) domain (residues 231-340 of human IgG1) and/or (e.g., and) the third constant (CH3) domain (residues 341-447 of human IgG1), with numbering according to the EU index in Kabat (Kabat E A et al., (1991) supra). In some embodiments, the constant region of the IgG1 of an antibody described herein comprises a methionine (M) to tyrosine (Y) substitution in position 252, a serine (S) to threonine (T) substitution in position 254, and a threonine (T) to glutamic acid (E) substitution in position 256, numbered according to the EU index as in Kabat. See U.S. Pat. No. 7,658,921, which is incorporated herein by reference. This type of mutant IgG, referred to as “YTE mutant” has been shown to display fourfold increased half-life as compared to wild-type versions of the same antibody (see Dall′Acqua W F et al., (2006) J Biol Chem 281: 23514-24). In some embodiments, an antibody comprises an IgG constant domain comprising one, two, three or more amino acid substitutions of amino acid residues at positions 251-257, 285-290, 308-314, 385-389, and 428-436, numbered according to the EU index as in Kabat.

[0228] In some embodiments, one, two or more amino acid substitutions are introduced into an IgG constant domain Fc region to alter the effector function(s) of the anti-transferrin receptor antibody. The effector ligand to which affinity is altered can be, for example, an Fc receptor or the C1 component of complement. This approach is described in further detail in U.S. Pat. Nos. 5,624,821 and 5,648,260. In some embodiments, the deletion or inactivation (through point mutations or other means) of a constant region domain can reduce Fc receptor binding of the circulating antibody thereby increasing tumor localization. See, e.g., U.S. Pat. Nos. 5,585,097 and 8,591,886 for a description of mutations that delete or inactivate the constant domain and thereby increase tumor localization. In some embodiments, one or more amino acid substitutions may be introduced into the Fc region of an antibody described herein to remove potential glycosylation sites on Fc region, which may reduce Fc receptor binding (see, e.g., Shields R L et al., (2001) J Biol Chem 276: 6591-604).

[0229] In some embodiments, one or more amino in the constant region of a muscle-targeting antibody described herein can be replaced with a different amino acid residue such that the antibody has altered C1q binding and/or (e.g., and) reduced or abolished complement dependent cytotoxicity (CDC). This approach is described in further detail in U.S. Pat. No. 6,194,551 (Idusogie et al). In some embodiments, one or more amino acid residues in the N-terminal region of the CH2 domain of an antibody described herein are altered to thereby alter the ability of the antibody to fix complement. This approach is described further in International Publication No. WO 94/29351. In some embodiments, the Fc region of an antibody described herein is modified to increase the ability of the antibody to mediate antibody dependent cellular cytotoxicity (ADCC) and/or (e.g., and) to increase the affinity of the antibody for an Fcγ receptor. This approach is described further in International Publication No. WO 00/42072.

[0230] In some embodiments, the heavy and/or (e.g., and) light chain variable domain(s) sequence(s) of the antibodies provided herein can be used to generate, for example, CDR-grafted, chimeric, humanized, or composite human antibodies or antigen-binding fragments, as described elsewhere herein. As understood by one of ordinary skill in the art, any variant, CDR-grafted, chimeric, humanized, or composite antibodies derived from any of the antibodies provided herein may be useful in the compositions and methods described herein and will maintain the ability to specifically bind transferrin receptor, such that the variant, CDR-grafted, chimeric, humanized, or composite antibody has at least 50%, at least 60%, at least 70%, at least 80%, at least 90%, at least 95% or more binding to transferrin receptor relative to the original antibody from which it is derived.

[0231] In some embodiments, the antibodies provided herein comprise mutations that confer desirable properties to the antibodies. For example, to avoid potential complications due to Fab-arm exchange, which is known to occur with native IgG4 mAbs, the antibodies provided herein may comprise a stabilizing ‘Adair’ mutation (Angal S., et al., “A single amino acid substitution abolishes the heterogeneity of chimeric mouse/human (IgG4) antibody,” Mol Immunol 30, 105-108; 1993), where serine 228 (EU numbering; residue 241 Kabat numbering) is converted to proline resulting in an IgG1-like hinge sequence. Accordingly, any of the antibodies may include a stabilizing ‘Adair’ mutation.

[0232] As provided herein, antibodies of this disclosure may optionally comprise constant regions or parts thereof. For example, a VL domain may be attached at its C-terminal end to a light chain constant domain like Cκ or Cλ. Similarly, a VH domain or portion thereof may be attached to all or part of a heavy chain like IgA, IgD, IgE, IgG, and IgM, and any isotype subclass. Antibodies may include suitable constant regions (see, for example, Kabat et al., Sequences of Proteins of Immunological Interest, No. 91-3242, National Institutes of Health Publications, Bethesda, Md. (1991)). Therefore, antibodies within the scope of this may disclosure include VH and VL domains, or an antigen binding portion thereof, combined with any suitable constant regions.

ii. Muscle-Targeting Peptides

[0233] Some aspects of the disclosure provide muscle-targeting peptides as muscle-targeting agents. Short peptide sequences (e.g., peptide sequences of 5-20 amino acids in length) that bind to specific cell types have been described. For example, cell-targeting peptides have been described in Vines e., et al., A. “Cell-penetrating and cell-targeting peptides in drug delivery” Biochim Biophys Acta 2008, 1786: 126-38; Jarver P., et al., “In vivo biodistribution and efficacy of peptide mediated delivery” Trends Pharmacol Sci 2010; 31: 528-35; Samoylova T. I., et al., “Elucidation of muscle-binding peptides by phage display screening” Muscle Nerve 1999; 22: 460-6; U.S. Pat. No. 6,329,501, issued on Dec. 11, 2001, entitled “METHODS AND COMPOSITIONS FOR TARGETING COMPOUNDS TO MUSCLE”; and Samoylov A. M., et al., “Recognition of cell-specific binding of phage display derived peptides using an acoustic wave sensor.” Biomol Eng 2002; 18: 269-72; the entire contents of each of which are incorporated herein by reference. By designing peptides to interact with specific cell surface antigens (e.g., receptors), selectivity for a desired tissue, e.g., muscle, can be achieved. Skeletal muscle-targeting has been investigated and a range of molecular payloads are able to be delivered. These approaches may have high selectivity for muscle tissue without many of the practical disadvantages of a large antibody or viral particle. Accordingly, in some embodiments, the muscle-targeting agent is a muscle-targeting peptide that is from 4 to 50 amino acids in length. In some embodiments, the muscle-targeting peptide is 4, 5, 6, 7, 8, 9, 10, 11, 12, 13, 14, 15, 16, 17, 18, 19, 20, 21, 22, 23, 24, 25, 26, 27, 28, 29, 30, 31, 32, 33, 34, 35, 36, 37, 38, 39, 40, 41, 42, 43, 44, 45, 46, 47, 48, 49, or 50 amino acids in length. Muscle-targeting peptides can be generated using any of several methods, such as phage display.

[0234] In some embodiments, a muscle-targeting peptide may bind to an internalizing cell surface receptor that is overexpressed or relatively highly expressed in muscle cells, e.g. a transferrin receptor, compared with certain other cells. In some embodiments, a muscle-targeting peptide may target, e.g., bind to, a transferrin receptor. In some embodiments, a peptide that targets a transferrin receptor may comprise a segment of a naturally occurring ligand, e.g., transferrin. In some embodiments, a peptide that targets a transferrin receptor is as described in U.S. Pat. No. 6,743,893, filed Nov. 30, 2000, “RECEPTOR-MEDIATED UPTAKE OF PEPTIDES THAT BIND THE HUMAN TRANSFERRIN RECEPTOR”. In some embodiments, a peptide that targets a transferrin receptor is as described in Kawamoto, M. et al, “A novel transferrin receptor-targeted hybrid peptide disintegrates cancer cell membrane to induce rapid killing of cancer cells.” BMC Cancer. 2011 Aug. 18; 11:359. In some embodiments, a peptide that targets a transferrin receptor is as described in U.S. Pat. No. 8,399,653, filed May 20, 2011, “TRANSFERRIN/TRANSFERRIN RECEPTOR-MEDIATED SIRNA DELIVERY”.

[0235] As discussed above, examples of muscle targeting peptides have been reported. For example, muscle-specific peptides were identified using phage display library presenting surface heptapeptides. As one example a peptide having the amino acid sequence ASSLNIA (SEQ ID NO: 2170) bound to C2C12 murine myotubes in vitro, and bound to mouse muscle tissue in vivo. Accordingly, in some embodiments, the muscle-targeting agent comprises the amino acid sequence ASSLNIA (SEQ ID NO: 2170). This peptide displayed improved specificity for binding to heart and skeletal muscle tissue after intravenous injection in mice with reduced binding to liver, kidney, and brain. Additional muscle-specific peptides have been identified using phage display. For example, a 12 amino acid peptide was identified by phage display library for muscle targeting in the context of treatment for Duchenne muscular dystrophy. See, Yoshida D., et al., “Targeting of salicylate to skin and muscle following topical injections in rats.” Int J Pharm 2002; 231: 177-84; the entire contents of which are hereby incorporated by reference. Here, a 12 amino acid peptide having the sequence SKTFNTHPQSTP (SEQ ID NO: 2171) was identified and this muscle-targeting peptide showed improved binding to C2C12 cells relative to the ASSLNIA (SEQ ID NO: 2170) peptide.

[0236] An additional method for identifying peptides selective for muscle (e.g., skeletal muscle) over other cell types includes in vitro selection, which has been described in Ghosh D., et al., “Selection of muscle-binding peptides from context-specific peptide-presenting phage libraries for adenoviral vector targeting” J Virol 2005; 79: 13667-72; the entire contents of which are incorporated herein by reference. By pre-incubating a random 12-mer peptide phage display library with a mixture of non-muscle cell types, non-specific cell binders were selected out. Following rounds of selection the 12 amino acid peptide TARGEHKEEELI (SEQ ID NO: 2172) appeared most frequently. Accordingly, in some embodiments, the muscle-targeting agent comprises the amino acid sequence TARGEHKEEELI (SEQ ID NO: 2172).

[0237] A muscle-targeting agent may an amino acid-containing molecule or peptide. A muscle-targeting peptide may correspond to a sequence of a protein that preferentially binds to a protein receptor found in muscle cells. In some embodiments, a muscle-targeting peptide contains a high propensity of hydrophobic amino acids, e.g. valine, such that the peptide preferentially targets muscle cells. In some embodiments, a muscle-targeting peptide has not been previously characterized or disclosed. These peptides may be conceived of, produced, synthesized, and/or (e.g., and) derivatized using any of several methodologies, e.g. phage displayed peptide libraries, one-bead one-compound peptide libraries, or positional scanning synthetic peptide combinatorial libraries. Exemplary methodologies have been characterized in the art and are incorporated by reference (Gray, B. P. and Brown, K. C. “Combinatorial Peptide Libraries: Mining for Cell-Binding Peptides” Chem Rev. 2014, 114:2, 1020-1081.; Samoylova, T. I. and Smith, B. F. “Elucidation of muscle-binding peptides by phage display screening.” Muscle Nerve, 1999, 22:4. 460-6.). In some embodiments, a muscle-targeting peptide has been previously disclosed (see, e.g. Writer M. J. et al. “Targeted gene delivery to human airway epithelial cells with synthetic vectors incorporating novel targeting peptides selected by phage display.” J. Drug Targeting. 2004; 12:185; Cai, D. “BDNF-mediated enhancement of inflammation and injury in the aging heart.” Physiol Genomics. 2006, 24:3, 191-7.; Zhang, L. “Molecular profiling of heart endothelial cells.” Circulation, 2005, 112:11, 1601-11.; McGuire, M. J. et al. “In vitro selection of a peptide with high selectivity for cardiomyocytes in vivo.” J Mol Biol. 2004, 342:1, 171-82.). Exemplary muscle-targeting peptides comprise an amino acid sequence of the following group: CQAQGQLVC (SEQ ID NO: 2173), CSERSMNFC (SEQ ID NO: 2174), CPKTRRVPC (SEQ ID NO: 2175), WLSEAGPVVTVRALRGTGSW (SEQ ID NO: 2176), ASSLNIA (SEQ ID NO: 2170), CMQHSMRVC (SEQ ID NO: 2177), and DDTRHWG (SEQ ID NO: 2178). In some embodiments, a muscle-targeting peptide may comprise about 2-25 amino acids, about 2-20 amino acids, about 2-15 amino acids, about 2-10 amino acids, or about 2-5 amino acids. Muscle-targeting peptides may comprise naturally-occurring amino acids, e.g. cysteine, alanine, or non-naturally-occurring or modified amino acids. Non-naturally occurring amino acids include β-amino acids, homo-amino acids, proline derivatives, 3-substituted alanine derivatives, linear core amino acids, N-methyl amino acids, and others known in the art. In some embodiments, a muscle-targeting peptide may be linear; in other embodiments, a muscle-targeting peptide may be cyclic, e.g. bicyclic (see, e.g. Silvana, M. G. et al. Mol. Therapy, 2018, 26:1, 132-147.).

iii. Muscle-Targeting Receptor Ligands

[0238] A muscle-targeting agent may be a ligand, e.g. a ligand that binds to a receptor protein. A muscle-targeting ligand may be a protein, e.g. transferrin, which binds to an internalizing cell surface receptor expressed by a muscle cell. Accordingly, in some embodiments, the muscle-targeting agent is transferrin, or a derivative thereof that binds to a transferrin receptor. A muscle-targeting ligand may alternatively be a small molecule, e.g. a lipophilic small molecule that preferentially targets muscle cells relative to other cell types. Exemplary lipophilic small molecules that may target muscle cells include compounds comprising cholesterol, cholesteryl, stearic acid, palmitic acid, oleic acid, oleyl, linolene, linoleic acid, myristic acid, sterols, dihydrotestosterone, testosterone derivatives, glycerine, alkyl chains, trityl groups, and alkoxy acids.

iv. Muscle-Targeting Aptamers

[0239] A muscle-targeting agent may be an aptamer, e.g. an RNA aptamer, which preferentially targets muscle cells relative to other cell types. In some embodiments, a muscle-targeting aptamer has not been previously characterized or disclosed. These aptamers may be conceived of, produced, synthesized, and/or (e.g., and) derivatized using any of several methodologies, e.g. Systematic Evolution of Ligands by Exponential Enrichment. Exemplary methodologies have been characterized in the art and are incorporated by reference (Yan, A. C. and Levy, M. “Aptamers and aptamer targeted delivery” RNA biology, 2009, 6:3, 316-20.; Germer, K. et al. “RNA aptamers and their therapeutic and diagnostic applications.” Int. J. Biochem. Mol. Biol. 2013; 4: 27-40.). In some embodiments, a muscle-targeting aptamer has been previously disclosed (see, e.g. Phillippou, S. et al. “Selection and Identification of Skeletal-Muscle-Targeted RNA Aptamers.” Mol Ther Nucleic Acids. 2018, 10:199-214.; Thiel, W. H. et al. “Smooth Muscle Cell-targeted RNA Aptamer Inhibits Neointimal Formation.” Mol Ther. 2016, 24:4, 779-87.). Exemplary muscle-targeting aptamers include the A01B RNA aptamer and RNA Apt 14. In some embodiments, an aptamer is a nucleic acid-based aptamer, an oligonucleotide aptamer or a peptide aptamer. In some embodiments, an aptamer may be about 5-15 kDa, about 5-10 kDa, about 10⁻¹⁵ kDa, about 1-5 Da, about 1-3 kDa, or smaller.

v. Other Muscle-Targeting Agents

[0240] One strategy for targeting a muscle cell (e.g., a skeletal muscle cell) is to use a substrate of a muscle transporter protein, such as a transporter protein expressed on the sarcolemma. In some embodiments, the muscle-targeting agent is a substrate of an influx transporter that is specific to muscle tissue. In some embodiments, the influx transporter is specific to skeletal muscle tissue. Two main classes of transporters are expressed on the skeletal muscle sarcolemma, (1) the adenosine triphosphate (ATP) binding cassette (ABC) superfamily, which facilitate efflux from skeletal muscle tissue and (2) the solute carrier (SLC) superfamily, which can facilitate the influx of substrates into skeletal muscle. In some embodiments, the muscle-targeting agent is a substrate that binds to an ABC superfamily or an SLC superfamily of transporters. In some embodiments, the substrate that binds to the ABC or SLC superfamily of transporters is a naturally-occurring substrate. In some embodiments, the substrate that binds to the ABC or SLC superfamily of transporters is a non-naturally occurring substrate, for example, a synthetic derivative thereof that binds to the ABC or SLC superfamily of transporters.

[0241] In some embodiments, the muscle-targeting agent is any muscle targeting agent described herein (e.g., antibodies, nucleic acids, small molecules, peptides, aptamers, lipids, sugar moieties) that target SLC superfamily of transporters. In some embodiments, the muscle-targeting agent is a substrate of an SLC superfamily of transporters. SLC transporters are either equilibrative or use proton or sodium ion gradients created across the membrane to drive transport of substrates. Exemplary SLC transporters that have high skeletal muscle expression include, without limitation, the SATT transporter (ASCT1; SLC1A4), GLUT4 transporter (SLC2A4), GLUT7 transporter (GLUT7; SLC2A7), ATRC2 transporter (CAT-2; SLC7A2), LAT3 transporter (KIAA0245; SLC7A6), PHT1 transporter (PTR4; SLC15A4), OATP-J transporter (OATP5A1; SLC21A15), OCT3 transporter (EMT; SLC22A3), OCTN2 transporter (FLJ46769; SLC22A5), ENT transporters (ENT1; SLC29A1 and ENT2; SLC29A2), PAT2 transporter (SLC36A2), and SAT2 transporter (KIAA1382; SLC38A2). These transporters can facilitate the influx of substrates into skeletal muscle, providing opportunities for muscle targeting.

[0242] In some embodiments, the muscle-targeting agent is a substrate of an equilibrative nucleoside transporter 2 (ENT2) transporter. Relative to other transporters, ENT2 has one of the highest mRNA expressions in skeletal muscle. While human ENT2 (hENT2) is expressed in most body organs such as brain, heart, placenta, thymus, pancreas, prostate, and kidney, it is especially abundant in skeletal muscle. Human ENT2 facilitates the uptake of its substrates depending on their concentration gradient. ENT2 plays a role in maintaining nucleoside homeostasis by transporting a wide range of purine and pyrimidine nucleobases. The hENT2 transporter has a low affinity for all nucleosides (adenosine, guanosine, uridine, thymidine, and cytidine) except for inosine. Accordingly, in some embodiments, the muscle-targeting agent is an ENT2 substrate. Exemplary ENT2 substrates include, without limitation, inosine, 2′,3′-dideoxyinosine, and calofarabine. In some embodiments, any of the muscle-targeting agents provided herein are associated with a molecular payload (e.g., oligonucleotide payload). In some embodiments, the muscle-targeting agent is covalently linked to the molecular payload. In some embodiments, the muscle-targeting agent is non-covalently linked to the molecular payload.

[0243] In some embodiments, the muscle-targeting agent is a substrate of an organic cation/carnitine transporter (OCTN2), which is a sodium ion-dependent, high affinity carnitine transporter. In some embodiments, the muscle-targeting agent is carnitine, mildronate, acetylcarnitine, or any derivative thereof that binds to OCTN2. In some embodiments, the carnitine, mildronate, acetylcarnitine, or derivative thereof is covalently linked to the molecular payload (e.g., oligonucleotide payload).

[0244] A muscle-targeting agent may be a protein that is protein that exists in at least one soluble form that targets muscle cells. In some embodiments, a muscle-targeting protein may be hemojuvelin (also known as repulsive guidance molecule C or hemochromatosis type 2 protein), a protein involved in iron overload and homeostasis. In some embodiments, hemojuvelin may be full length or a fragment, or a mutant with at least 75%, at least 80%, at least 85%, at least 90%, at least 95%, at least 98% or at least 99% sequence identity to a functional hemojuvelin protein. In some embodiments, a hemojuvelin mutant may be a soluble fragment, may lack a N-terminal signaling, and/or (e.g., and) lack a C-terminal anchoring domain. In some embodiments, hemojuvelin may be annotated under GenBank RefSeq Accession Numbers NM_001316767.1, NM_145277.4, NM_202004.3, NM_213652.3, or NM_213653.3. It should be appreciated that a hemojuvelin may be of human, non-human primate, or rodent origin.

### B. Molecular Payloads

[0245] Some aspects of the disclosure provide molecular payloads, e.g., for modulating a biological outcome, e.g., the transcription of a DNA sequence, the splicing and processing of an RNA sequence, the expression of a protein, or the activity of a protein. In some embodiments, a molecular payload is linked to, or otherwise associated with a muscle-targeting agent. In some embodiments, such molecular payloads are capable of targeting to a muscle cell, e.g., via specifically binding to a nucleic acid or protein in the muscle cell following delivery to the muscle cell by an associated muscle-targeting agent. It should be appreciated that various types of molecular payloads may be used in accordance with the disclosure. For example, the molecular payload may comprise, or consist of, an oligonucleotide (e.g., antisense oligonucleotide), a peptide (e.g., a peptide that binds a nucleic acid or protein associated with disease in a muscle cell), a protein (e.g., a protein that binds a nucleic acid or protein associated with disease in a muscle cell), or a small molecule (e.g., a small molecule that modulates the function of a nucleic acid or protein associated with disease in a muscle cell). In some embodiments, the molecular payload is an oligonucleotide that comprises a strand having a region of complementarity to a mutated DMD allele. Exemplary molecular payloads are described in further detail herein, however, it should be appreciated that the exemplary molecular payloads provided herein are not meant to be limiting.

i. Oligonucleotides

[0246] Aspects of the disclosure relate to oligonucleotides configured to modulate (e.g., increase) expression of dystrophin, e.g., from a DMD allele. In some embodiments, oligonucleotides provided herein are configured to alter splicing of DMD pre-mRNA to promote expression of dystrophin protein (e.g., a functional truncated dystrophin protein). In some embodiments, oligonucleotides provided herein are configured to promote skipping of one or more exons in DMD, e.g., in a mutated DMD allele, in order to restore the reading frame. In some embodiments, the oligonucleotides allow for functional dystrophin protein expression (e.g., as described in Watanabe N, Nagata T, Satou Y, et al. NS-065/NCNP-01: an antisense oligonucleotide for potential treatment of exon 53 skipping in Duchenne muscular dystrophy. Mol Ther Nucleic Acids. 2018; 13:442-449). In some embodiments, oligonucleotides provided are configured to promote skipping of exon 55 to produce a shorter but functional version of dystrophin (e.g., containing an in-frame deletion). In some embodiments, oligonucleotides are provided that promote exon 55 skipping (e.g., which may be relevant in a substantial number of patients, including, for example, patients amenable to exon 55 skipping, such as those having deletions in DMD exons 3-54, 4-54, 5-54, 6-54, 9-54, 10-54, 11-54, 13-54, 14-54, 15-54, 16-54, 17-54, 19-54, 21-54, 23-54, 24-54, 25-54, 26-54, 27-54, 28-54, 29-54, 30-54, 31-54, 32-54, 33-54, 34-54, 35-54, 36-54, 37-54, 38-54, 39-54, 40-54, 41-54, 42-54, 43-54, 45-54, 47-54, 48-54, 49-54, 50-54, 52-54, 54, 56, 56-62, 56-65, 56-68, 56-70, 56-71, 56-72, 56-73, or 56-74).

[0247] Table 8 provides non-limiting examples of sequences of oligonucleotides that are useful for targeting DMD, e.g., for exon skipping, and for target sequences within DMD. In some embodiments, an oligonucleotide may comprise any antisense sequence provided in Table 8 or a sequence complementary to a target sequence provided in Table 8.

TABLE 8
Oligonucleotide sequences for targeting DMD.

| SEQ | | SEQ | Antisense | SEQ | Antisense | |
|---|---|---|---|---|---|---|
| ID | Target sequence† | ID | Sequence† | ID | Sequence† | |
| NO | (5′ to 3′) | NO | (5′ to 3′) | NO | (5′ to 3′) | Target Site |
| 160 | GGAAGAAACUCAU | 780 | UGCAGUAAUCUAU | 1400 | TGCAGTAATCTAT | Exon 55 |
| | AGAUUACUGCA | | GAGUUUCUUCC | | GAGTTTCTTCC | |
| 161 | GAAACAACUGCCA | 781 | GUAGGACAUUGGC | 1401 | GTAGGACATTGGC | Exon 55 |
| | AUGUCCUAC | | AGUUGUUUC | | AGTTGTTTC | |
| 162 | GAAACAACUGCCA | 782 | UGUAGGACAUUGG | 1402 | TGTAGGACATTGG | Exon 55 |
| | AUGUCCUACA | | CAGUUGUUUC | | CAGTTGTTTC | |
| 163 | GAAACAACUGCCA | 783 | CUGUAGGACAUUG | 1403 | CTGTAGGACATTG | Exon 55 |
| | AUGUCCUACAG | | GCAGUUGUUUC | | GCAGTTGTTTC | |
| 164 | GAAACAACUGCCA | 784 | CCUGUAGGACAUU | 1404 | CCTGTAGGACATT | Exon 55 |
| | AUGUCCUACAGG | | GGCAGUUGUUUC | | GGCAGTTGTTTC | |
| 165 | AAACAACUGCCAA | 785 | CCUGUAGGACAUU | 1405 | CCTGTAGGACATT | Exon 55 |
| | UGUCCUACAGG | | GGCAGUUGUUU | | GGCAGTTGTTT | |
| 166 | AAACAACUGCCAA | 786 | UCCUGUAGGACAU | 1406 | TCCTGTAGGACAT | Exon 55 |
| | UGUCCUACAGGA | | UGGCAGUUGUUU | | TGGCAGTTGTTT | |
| 167 | AACAACUGCCAAU | 787 | CUGUAGGACAUUG | 1407 | CTGTAGGACATTG | Exon 55 |
| | GUCCUACAG | | GCAGUUGUU | | GCAGTTGTT | |
| 168 | AACAACUGCCAAU | 788 | CCUGUAGGACAUU | 1408 | CCTGTAGGACATT | Exon 55 |
| | GUCCUACAGG | | GGCAGUUGUU | | GGCAGTTGTT | |
| 169 | AACAACUGCCAAU | 789 | UCCUGUAGGACAU | 1409 | TCCTGTAGGACAT | Exon 55 |
| | GUCCUACAGGA | | UGGCAGUUGUU | | TGGCAGTTGTT | |
| 170 | ACAACUGCCAAUG | 790 | UGUAGGACAUUGG | 1410 | TGTAGGACATTGG | Exon 55 |
| | UCCUACA | | CAGUUGU | | CAGTTGT | |
| 171 | ACAACUGCCAAUG | 791 | CUGUAGGACAUUG | 1411 | CTGTAGGACATTG | Exon 55 |
| | UCCUACAG | | GCAGUUGU | | GCAGTTGT | |
| 172 | ACAACUGCCAAUG | 792 | CCUGUAGGACAUU | 1412 | CCTGTAGGACATT | Exon 55 |
| | UCCUACAGG | | GGCAGUUGU | | GGCAGTTGT | |
| 173 | ACAACUGCCAAUG | 793 | UCCUGUAGGACAU | 1413 | TCCTGTAGGACAT | Exon 55 |
| | UCCUACAGGA | | UGGCAGUUGU | | TGGCAGTTGT | |
| 174 | CAACUGCCAAUGU | 794 | CCUGUAGGACAUU | 1414 | CCTGTAGGACATT | Exon 55 |
| | CCUACAGG | | GGCAGUUG | | GGCAGTTG | |
| 175 | CAACUGCCAAUGU | 795 | UCCUGUAGGACAU | 1415 | TCCTGTAGGACAT | Exon 55 |
| | CCUACAGGA | | UGGCAGUUG | | TGGCAGTTG | |
| 176 | AACUGCCAAUGUC | 796 | UCCUGUAGGACAU | 1416 | TCCTGTAGGACAT | Exon 55 |
| | CUACAGGA | | UGGCAGUU | | TGGCAGTT | |
| 177 | ACUGCCAAUGUCC | 797 | UCCUGUAGGACAU | 1417 | TCCTGTAGGACAT | Exon 55 |
| | UACAGGA | | UGGCAGU | | TGGCAGT | |
| 178 | AGAAACUCAUAGA | 798 | UGUUGCAGUAAUC | 1418 | TGTTGCAGTAATC | Exon 55 |
| | UUACUGCAACA | | UAUGAGUUUCU | | TATGAGTTTCT | |
| 179 | AGAAACUCAUAGA | 799 | CUGUUGCAGUAAU | 1419 | CTGTTGCAGTAAT | Exon 55 |
| | UUACUGCAACAG | | CUAUGAGUUUCU | | CTATGAGTTTCT | |
| 180 | GAAACUCAUAGAU | 800 | CUGUUGCAGUAAU | 1420 | CTGTTGCAGTAAT | Exon 55 |
| | UACUGCAACAG | | CUAUGAGUUUC | | CTATGAGTTTC | |
| 181 | GAUGAUACCAGAA | 801 | AUGUGGACUUUUC | 1421 | ATGTGGACTTTTC | Exon 54 |
| | AAGUCCACAU | | UGGUAUCAUC | | TGGTATCATC | |
| 182 | GAUGAUACCAGAA | 802 | UCAUGUGGACUUU | 1422 | TCATGTGGACTTT | Exon 54 |
| | AAGUCCACAUGA | | UCUGGUAUCAUC | | TCTGGTATCATC | |
| 183 | AUGAUACCAGAAA | 803 | UCAUGUGGACUUU | 1423 | TCATGTGGACTTT | Exon 54 |
| | AGUCCACAUGA | | UCUGGUAUCAU | | TCTGGTATCAT | |
| 184 | AUGAUACCAGAAA | 804 | AUCAUGUGGACUU | 1424 | ATCATGTGGACTT | Exon 54 |
| | AGUCCACAUGAU | | UUCUGGUAUCAU | | TTCTGGTATCAT | |
| 185 | UGAUACCAGAAAA | 805 | UCAUGUGGACUUU | 1425 | TCATGTGGACTTT | Exon 54 |
| | GUCCACAUGA | | UCUGGUAUCA | | TCTGGTATCA | |
| 186 | UGAUACCAGAAAA | 806 | AUCAUGUGGACUU | 1426 | ATCATGTGGACTT | Exon 54 |
| | GUCCACAUGAU | | UUCUGGUAUCA | | TTCTGGTATCA | |
| 187 | GAUACCAGAAAAG | 807 | UCAUGUGGACUUU | 1427 | TCATGTGGACTTT | Exon 54 |
| | UCCACAUGA | | UCUGGUAUC | | TCTGGTATC | |
| 188 | GAUACCAGAAAAG | 808 | AUCAUGUGGACUU | 1428 | ATCATGTGGACTT | Exon 54 |
| | UCCACAUGAU | | UUCUGGUAUC | | TTCTGGTATC | |
| 189 | GAUACCAGAAAAG | 809 | UUAUCAUGUGGAC | 1429 | TTATCATGTGGAC | Exon 54 |
| | UCCACAUGAUAA | | UUUUCUGGUAUC | | TTTTCTGGTATC | |
| 190 | AUACCAGAAAAGU | 810 | UCAUGUGGACUUU | 1430 | TCATGTGGACTTT | Exon 54 |
| | CCACAUGA | | UCUGGUAU | | TCTGGTAT | |
| 191 | AUACCAGAAAAGU | 811 | AUCAUGUGGACUU | 1431 | ATCATGTGGACTT | Exon 54 |
| | CCACAUGAU | | UUCUGGUAU | | TTCTGGTAT | |
| 192 | AUACCAGAAAAGU | 812 | GUUAUCAUGUGGA | 1432 | GTTATCATGTGGA | Exon 54 |
| | CCACAUGAUAAC | | CUUUUCUGGUAU | | CTTTTCTGGTAT | |
| 193 | UACCAGAAAAGUC | 813 | UCAUGUGGACUUU | 1433 | TCATGTGGACTTT | Exon 54 |
| | CACAUGA | | UCUGGUA | | TCTGGTA | |
| 194 | UACCAGAAAAGUC | 814 | AUCAUGUGGACUU | 1434 | ATCATGTGGACTT | Exon 54 |
| | CACAUGAU | | UUCUGGUA | | TTCTGGTA | |
| 195 | UACCAGAAAAGUC | 815 | UUAUCAUGUGGAC | 1435 | TTATCATGTGGAC | Exon 54 |
| | CACAUGAUAA | | UUUUCUGGUA | | TTTTCTGGTA | |
| 196 | UACCAGAAAAGUC | 816 | GUUAUCAUGUGGA | 1436 | GTTATCATGTGGA | Exon 54 |
| | CACAUGAUAAC | | CUUUUCUGGUA | | CTTTTCTGGTA | |
| 197 | UACCAGAAAAGUC | 817 | UGUUAUCAUGUGG | 1437 | TGTTATCATGTGG | Exon 54 |
| | CACAUGAUAACA | | ACUUUUCUGGUA | | ACTTTTCTGGTA | |
| 198 | ACCAGAAAAGUCC | 818 | AUCAUGUGGACUU | 1438 | ATCATGTGGACTT | Exon 54 |
| | ACAUGAU | | UUCUGGU | | TTCTGGT | |
| 199 | ACCAGAAAAGUCC | 819 | UUAUCAUGUGGAC | 1439 | TTATCATGTGGAC | Exon 54 |
| | ACAUGAUAA | | UUUUCUGGU | | TTTTCTGGT | |
| 200 | ACCAGAAAAGUCC | 820 | GUUAUCAUGUGGA | 1440 | GTTATCATGTGGA | Exon 54 |
| | ACAUGAUAAC | | CUUUUCUGGU | | CTTTTCTGGT | |
| 201 | ACCAGAAAAGUCC | 821 | UGUUAUCAUGUGG | 1441 | TGTTATCATGTGG | Exon 54 |
| | ACAUGAUAACA | | ACUUUUCUGGU | | ACTTTTCTGGT | |
| 202 | ACCAGAAAAGUCC | 822 | CUGUUAUCAUGUG | 1442 | CTGTTATCATGTG | Exon 54 |
| | ACAUGAUAACAG | | GACUUUUCUGGU | | GACTTTTCTGGT | |
| 203 | CCAGAAAAGUCCA | 823 | UUAUCAUGUGGAC | 1443 | TTATCATGTGGAC | Exon 54 |
| | CAUGAUAA | | UUUUCUGG | | TTTTCTGG | |
| 204 | CCAGAAAAGUCCA | 824 | GUUAUCAUGUGGA | 1444 | GTTATCATGTGGA | Exon 54 |
| | CAUGAUAAC | | CUUUUCUGG | | CTTTTCTGG | |
| 205 | CCAGAAAAGUCCA | 825 | UGUUAUCAUGUGG | 1445 | TGTTATCATGTGG | Exon 54 |
| | CAUGAUAACA | | ACUUUUCUGG | | ACTTTTCTGG | |
| 206 | CCAGAAAAGUCCA | 826 | CUGUUAUCAUGUG | 1446 | CTGTTATCATGTG | Exon 54 |
| | CAUGAUAACAG | | GACUUUUCUGG | | GACTTTTCTGG | |
| 207 | CCAGAAAAGUCCA | 827 | UCUGUUAUCAUGU | 1447 | TCTGTTATCATGT | Exon 54 |
| | CAUGAUAACAGA | | GGACUUUUCUGG | | GGACTTTTCTGG | |
| 208 | CAGAAAAGUCCAC | 828 | GUUAUCAUGUGGA | 1448 | GTTATCATGTGGA | Exon 54 |
| | AUGAUAAC | | CUUUUCUG | | CTTTTCTG | |
| 209 | CAGAAAAGUCCAC | 829 | UGUUAUCAUGUGG | 1449 | TGTTATCATGTGG | Exon 54 |
| | AUGAUAACA | | ACUUUUCUG | | ACTTTTCTG | |
| 210 | CAGAAAAGUCCAC | 830 | CUGUUAUCAUGUG | 1450 | CTGTTATCATGTG | Exon 54 |
| | AUGAUAACAG | | GACUUUUCUG | | GACTTTTCTG | |
| 211 | CAGAAAAGUCCAC | 831 | UCUGUUAUCAUGU | 1451 | TCTGTTATCATGT | Exon 54 |
| | AUGAUAACAGA | | GGACUUUUCUG | | GGACTTTTCTG | |
| 212 | CAGAAAAGUCCAC | 832 | CUCUGUUAUCAUG | 1452 | CTCTGTTATCATG | Exon 54 |
| | AUGAUAACAGAG | | UGGACUUUUCUG | | TGGACTTTTCTG | |
| 213 | AGAAAAGUCCACA | 833 | UCUGUUAUCAUGU | 1453 | TCTGTTATCATGT | Exon 54 |
| | UGAUAACAGA | | GGACUUUUCU | | GGACTTTTCT | |
| 214 | AGAAAAGUCCACA | 834 | CUCUGUUAUCAUG | 1454 | CTCTGTTATCATG | Exon 54 |
| | UGAUAACAGAG | | UGGACUUUUCU | | TGGACTTTTCT | |
| 215 | AGAAAAGUCCACA | 835 | UCUCUGUUAUCAU | 1455 | TCTCTGTTATCAT | Exon 54 |
| | UGAUAACAGAGA | | GUGGACUUUUCU | | GTGGACTTTTCT | |
| 216 | GAAAAGUCCACAU | 836 | CUGUUAUCAUGUG | 1456 | CTGTTATCATGTG | Exon 54 |
| | GAUAACAG | | GACUUUUC | | GACTTTTC | |
| 217 | GAAAAGUCCACAU | 837 | UCUGUUAUCAUGU | 1457 | TCTGTTATCATGT | Exon 54 |
| | GAUAACAGA | | GGACUUUUC | | GGACTTTTC | |
| 218 | GAAAAGUCCACAU | 838 | CUCUGUUAUCAUG | 1458 | CTCTGTTATCATG | Exon 54 |
| | GAUAACAGAG | | UGGACUUUUC | | TGGACTTTTC | |
| 219 | GAAAAGUCCACAU | 839 | UCUCUGUUAUCAU | 1459 | TCTCTGTTATCAT | Exon 54 |
| | GAUAACAGAGA | | GUGGACUUUUC | | GTGGACTTTTC | |
| 220 | GAAAAGUCCACAU | 840 | UUCUCUGUUAUCA | 1460 | TTCTCTGTTATCA | Exon 54 |
| | GAUAACAGAGAA | | UGUGGACUUUUC | | TGTGGACTTTTC | |
| 221 | AAAAGUCCACAUG | 841 | CUCUGUUAUCAUG | 1461 | CTCTGTTATCATG | Exon 54 |
| | AUAACAGAG | | UGGACUUUU | | TGGACTTTT | |
| 222 | AAAAGUCCACAUG | 842 | UCUCUGUUAUCAU | 1462 | TCTCTGTTATCAT | Exon 54 |
| | AUAACAGAGA | | GUGGACUUUU | | GTGGACTTTT | |
| 223 | AAAAGUCCACAUG | 843 | UUCUCUGUUAUCA | 1463 | TTCTCTGTTATCA | Exon 54 |
| | AUAACAGAGAA | | UGUGGACUUUU | | TGTGGACTTTT | |
| 224 | AAAAGUCCACAUG | 844 | AUUCUCUGUUAUC | 1464 | ATTCTCTGTTATC | Exon 54 |
| | AUAACAGAGAAU | | AUGUGGACUUUU | | ATGTGGACTTTT | |
| 225 | AAAGUCCACAUGA | 845 | CUCUGUUAUCAUG | 1465 | CTCTGTTATCATG | Exon 54 |
| | UAACAGAG | | UGGACUUU | | TGGACTTT | |
| 226 | AAAGUCCACAUGA | 846 | UCUCUGUUAUCAU | 1466 | TCTCTGTTATCAT | Exon 54 |
| | UAACAGAGA | | GUGGACUUU | | GTGGACTTT | |
| 227 | AAAGUCCACAUGA | 847 | UUCUCUGUUAUCA | 1467 | TTCTCTGTTATCA | Exon 54 |
| | UAACAGAGAA | | UGUGGACUUU | | TGTGGACTTT | |
| 228 | AAAGUCCACAUGA | 848 | AUUCUCUGUUAUC | 1468 | ATTCTCTGTTATC | Exon 54 |
| | UAACAGAGAAU | | AUGUGGACUUU | | ATGTGGACTTT | |
| 229 | AAAGUCCACAUGA | 849 | UAUUCUCUGUUAU | 1469 | TATTCTCTGTTAT | Exon 54 |
| | UAACAGAGAAUA | | CAUGUGGACUUU | | CATGTGGACTTT | |
| 230 | AAGUCCACAUGAU | 850 | CUCUGUUAUCAUG | 1470 | CTCTGTTATCATG | Exon 54 |
| | AACAGAG | | UGGACUU | | TGGACTT | |
| 231 | AAGUCCACAUGAU | 851 | UCUCUGUUAUCAU | 1471 | TCTCTGTTATCAT | Exon 54 |
| | AACAGAGA | | GUGGACUU | | GTGGACTT | |
| 232 | AAGUCCACAUGAU | 852 | UUCUCUGUUAUCA | 1472 | TTCTCTGTTATCA | Exon 54 |
| | AACAGAGAA | | UGUGGACUU | | TGTGGACTT | |
| 233 | AAGUCCACAUGAU | 853 | AUUCUCUGUUAUC | 1473 | ATTCTCTGTTATC | Exon 54 |
| | AACAGAGAAU | | AUGUGGACUU | | ATGTGGACTT | |
| 234 | AAGUCCACAUGAU | 854 | UAUUCUCUGUUAU | 1474 | TATTCTCTGTTAT | Exon 54 |
| | AACAGAGAAUA | | CAUGUGGACUU | | CATGTGGACTT | |
| 235 | AAGUCCACAUGAU | 855 | AUAUUCUCUGUUA | 1475 | ATATTCTCTGTTA | Exon 54 |
| | AACAGAGAAUAU | | UCAUGUGGACUU | | TCATGTGGACTT | |
| 236 | AGUCCACAUGAUA | 856 | UUCUCUGUUAUCA | 1476 | TTCTCTGTTATCA | Exon 54 |
| | ACAGAGAA | | UGUGGACU | | TGTGGACT | |
| 237 | AGUCCACAUGAUA | 857 | AUUCUCUGUUAUC | 1477 | ATTCTCTGTTATC | Exon 54 |
| | ACAGAGAAU | | AUGUGGACU | | ATGTGGACT | |
| 238 | AGUCCACAUGAUA | 858 | UAUUCUCUGUUAU | 1478 | TATTCTCTGTTAT | Exon 54 |
| | ACAGAGAAUA | | CAUGUGGACU | | CATGTGGACT | |
| 239 | AGUCCACAUGAUA | 859 | AUAUUCUCUGUUA | 1479 | ATATTCTCTGTTA | Exon 54 |
| | ACAGAGAAUAU | | UCAUGUGGACU | | TCATGTGGACT | |
| 240 | AGUCCACAUGAUA | 860 | GAUAUUCUCUGUU | 1480 | GATATTCTCTGTT | Exon 54 |
| | ACAGAGAAUAUC | | AUCAUGUGGACU | | ATCATGTGGACT | |
| 241 | GUCCACAUGAUAA | 861 | GAUAUUCUCUGUU | 1481 | GATATTCTCTGTT | Exon 54 |
| | CAGAGAAUAUC | | AUCAUGUGGAC | | ATCATGTGGAC | |
| 242 | GUCCACAUGAUAA | 862 | UGAUAUUCUCUGU | 1482 | TGATATTCTCTGT | Exon 54 |
| | CAGAGAAUAUCA | | UAUCAUGUGGAC | | TATCATGTGGAC | |
| 243 | GGAAGAAACUCAU | 863 | UUGCAGUAAUCUA | 1483 | TTGCAGTAATCTA | Exon 55 |
| | AGAUUACUGCAA | | UGAGUUUCUUCC | | TGAGTTTCTTCC | |
| 244 | GCUGAAACAACUG | 864 | UAGGACAUUGGCA | 1484 | TAGGACATTGGCA | Exon 55 |
| | CCAAUGUCCUA | | GUUGUUUCAGC | | GTTGTTTCAGC | |
| 245 | GCUGAAACAACUG | 865 | GUAGGACAUUGGC | 1485 | GTAGGACATTGGC | Exon 55 |
| | CCAAUGUCCUAC | | AGUUGUUUCAGC | | AGTTGTTTCAGC | |
| 246 | UGAAACAACUGCC | 866 | GUAGGACAUUGGC | 1486 | GTAGGACATTGGC | Exon 55 |
| | AAUGUCCUAC | | AGUUGUUUCA | | AGTTGTTTCA | |
| 247 | UGAAACAACUGCC | 867 | UGUAGGACAUUGG | 1487 | TGTAGGACATTGG | Exon 55 |
| | AAUGUCCUACA | | CAGUUGUUUCA | | CAGTTGTTTCA | |
| 248 | UGAAACAACUGCC | 868 | CUGUAGGACAUUG | 1488 | CTGTAGGACATTG | Exon 55 |
| | AAUGUCCUACAG | | GCAGUUGUUUCA | | GCAGTTGTTTCA | |
| 249 | AACAACUGCCAAU | 869 | AUCCUGUAGGACA | 1489 | ATCCTGTAGGACA | Exon 55 |
| | GUCCUACAGGAU | | UUGGCAGUUGUU | | TTGGCAGTTGTT | |
| 250 | ACAACUGCCAAUG | 870 | AUCCUGUAGGACA | 1490 | ATCCTGTAGGACA | Exon 55 |
| | UCCUACAGGAU | | UUGGCAGUUGU | | TTGGCAGTTGT | |
| 251 | CAACUGCCAAUGU | 871 | AUCCUGUAGGACA | 1491 | ATCCTGTAGGACA | Exon 55 |
| | CCUACAGGAU | | UUGGCAGUUG | | TTGGCAGTTG | |
| 252 | AACUGCCAAUGUC | 872 | AUCCUGUAGGACA | 1492 | ATCCTGTAGGACA | Exon 55 |
| | CUACAGGAU | | UUGGCAGUU | | TTGGCAGTT | |
| 253 | AACUGCCAAUGUC | 873 | AGCAUCCUGUAGG | 1493 | AGCATCCTGTAGG | Exon 55 |
| | CUACAGGAUGCU | | ACAUUGGCAGUU | | ACATTGGCAGTT | |
| 254 | ACUGCCAAUGUCC | 874 | AUCCUGUAGGACA | 1494 | ATCCTGTAGGACA | Exon 55 |
| | UACAGGAU | | UUGGCAGU | | TTGGCAGT | |
| 255 | ACUGCCAAUGUCC | 875 | AGCAUCCUGUAGG | 1495 | AGCATCCTGTAGG | Exon 55 |
| | UACAGGAUGCU | | ACAUUGGCAGU | | ACATTGGCAGT | |
| 256 | CUGCCAAUGUCCU | 876 | AGCAUCCUGUAGG | 1496 | AGCATCCTGTAGG | Exon 55 |
| | ACAGGAUGCU | | ACAUUGGCAG | | ACATTGGCAG | |
| 257 | UGCCAAUGUCCUA | 877 | AGCAUCCUGUAGG | 1497 | AGCATCCTGTAGG | Exon 55 |
| | CAGGAUGCU | | ACAUUGGCA | | ACATTGGCA | |
| 258 | GCCAAUGUCCUAC | 878 | AGCAUCCUGUAGG | 1498 | AGCATCCTGTAGG | Exon 55 |
| | AGGAUGCU | | ACAUUGGC | | ACATTGGC | |
| 259 | AGAUGAUACCAGA | 879 | GGACUUUUCUGGU | 1499 | GGACTTTTCTGGT | Exon 54 |
| | AAAGUCC | | AUCAUCU | | ATCATCT | |
| 260 | AGAUGAUACCAGA | 880 | UGUGGACUUUUCU | 1500 | TGTGGACTTTTCT | Exon 54 |
| | AAAGUCCACA | | GGUAUCAUCU | | GGTATCATCT | |
| 261 | AGAUGAUACCAGA | 881 | AUGUGGACUUUUC | 1501 | ATGTGGACTTTTC | Exon 54 |
| | AAAGUCCACAU | | UGGUAUCAUCU | | TGGTATCATCT | |
| 262 | CUGAAACAACUGC | 882 | GUAGGACAUUGGC | 1502 | GTAGGACATTGGC | Exon 55 |
| | CAAUGUCCUAC | | AGUUGUUUCAG | | AGTTGTTTCAG | |
| 263 | CUGAAACAACUGC | 883 | UGUAGGACAUUGG | 1503 | TGTAGGACATTGG | Exon 55 |
| | CAAUGUCCUACA | | CAGUUGUUUCAG | | CAGTTGTTTCAG | |
| 264 | ACAACUGCCAAUG | 884 | CAUCCUGUAGGAC | 1504 | CATCCTGTAGGAC | Exon 55 |
| | UCCUACAGGAUG | | AUUGGCAGUUGU | | ATTGGCAGTTGT | |
| 265 | CAACUGCCAAUGU | 885 | CAUCCUGUAGGAC | 1505 | CATCCTGTAGGAC | Exon 55 |
| | CCUACAGGAUG | | AUUGGCAGUUG | | ATTGGCAGTTG | |
| 266 | AACUGCCAAUGUC | 886 | CAUCCUGUAGGAC | 1506 | CATCCTGTAGGAC | Exon 55 |
| | CUACAGGAUG | | AUUGGCAGUU | | ATTGGCAGTT | |
| 267 | ACUGCCAAUGUCC | 887 | CAUCCUGUAGGAC | 1507 | CATCCTGTAGGAC | Exon 55 |
| | UACAGGAUG | | AUUGGCAGU | | ATTGGCAGT | |
| 268 | ACUGCCAAUGUCC | 888 | UAGCAUCCUGUAG | 1508 | TAGCATCCTGTAG | Exon 55 |
| | UACAGGAUGCUA | | GACAUUGGCAGU | | GACATTGGCAGT | |
| 269 | CUGCCAAUGUCCU | 889 | CAUCCUGUAGGAC | 1509 | CATCCTGTAGGAC | Exon 55 |
| | ACAGGAUG | | AUUGGCAG | | ATTGGCAG | |
| 270 | CUGCCAAUGUCCU | 890 | UAGCAUCCUGUAG | 1510 | TAGCATCCTGTAG | Exon 55 |
| | ACAGGAUGCUA | | GACAUUGGCAG | | GACATTGGCAG | |
| 271 | UGCCAAUGUCCUA | 891 | UAGCAUCCUGUAG | 1511 | TAGCATCCTGTAG | Exon 55 |
| | CAGGAUGCUA | | GACAUUGGCA | | GACATTGGCA | |
| 272 | UGCCAAUGUCCUA | 892 | GGUAGCAUCCUGU | 1512 | GGTAGCATCCTGT | Exon 55 |
| | CAGGAUGCUACC | | AGGACAUUGGCA | | AGGACATTGGCA | |
| 273 | GCCAAUGUCCUAC | 893 | UAGCAUCCUGUAG | 1513 | TAGCATCCTGTAG | Exon 55 |
| | AGGAUGCUA | | GACAUUGGC | | GACATTGGC | |
| 274 | GCCAAUGUCCUAC | 894 | GGUAGCAUCCUGU | 1514 | GGTAGCATCCTGT | Exon 55 |
| | AGGAUGCUACC | | AGGACAUUGGC | | AGGACATTGGC | |
| 275 | CCAAGGGAGUAAA | 895 | UCAGCUCUUUUAC | 1515 | TCAGCTCTTTTAC | Exon 55 |
| | AGAGCUGA | | UCCCUUGG | | TCCCTTGG | |
| 276 | CCAAGGGAGUAAA | 896 | AUCAGCUCUUUUA | 1516 | ATCAGCTCTTTTA | Exon 55 |
| | AGAGCUGAU | | CUCCCUUGG | | CTCCCTTGG | |
| 277 | CCAAGGGAGUAAA | 897 | CAUCAGCUCUUUU | 1517 | CATCAGCTCTTTT | Exon 55 |
| | AGAGCUGAUG | | ACUCCCUUGG | | ACTCCCTTGG | |
| 278 | CCAAGGGAGUAAA | 898 | UCAUCAGCUCUUU | 1518 | TCATCAGCTCTTT | Exon 55 |
| | AGAGCUGAUGA | | UACUCCCUUGG | | TACTCCCTTGG | |
| 279 | CAAGGGAGUAAAA | 899 | UCAUCAGCUCUUU | 1519 | TCATCAGCTCTTT | Exon 55 |
| | GAGCUGAUGA | | UACUCCCUUG | | TACTCCCTTG | |
| 280 | CAAGGGAGUAAAA | 900 | UUCAUCAGCUCUU | 1520 | TTCATCAGCTCTT | Exon 55 |
| | GAGCUGAUGAA | | UUACUCCCUUG | | TTACTCCCTTG | |
| 281 | AGGGAGUAAAAGA | 901 | UUUCAUCAGCUCU | 1521 | TTTCATCAGCTCT | Exon 55 |
| | GCUGAUGAAA | | UUUACUCCCU | | TTTACTCCCT | |
| 282 | CUGAUGAAACAAU | 902 | GACUUACUUGCCA | 1522 | GACTTACTTGCCA | Exon 55/intron 55 |
| | GGCAAGUAAGUC | | UUGUUUCAUCAG | | TTGTTTCATCAG | junction |
| 283 | UGAUGAAACAAUG | 903 | GACUUACUUGCCA | 1523 | GACTTACTTGCCA | Exon 55/intron 55 |
| | GCAAGUAAGUC | | UUGUUUCAUCA | | TTGTTTCATCA | junction |
| 284 | GAUGAAACAAUGG | 904 | GACUUACUUGCCA | 1524 | GACTTACTTGCCA | Exon 55/intron 55 |
| | CAAGUAAGUC | | UUGUUUCAUC | | TTGTTTCATC | junction |
| 285 | CCUGGAAGGUUCC | 905 | GCAUCAUCGGAAC | 1525 | GCATCATCGGAAC | Exon 56 |
| | GAUGAUGC | | CUUCCAGG | | CTTCCAGG | |
| 286 | CCUGGAAGGUUCC | 906 | UGCAUCAUCGGAA | 1526 | TGCATCATCGGAA | Exon 56 |
| | GAUGAUGCA | | CCUUCCAGG | | CCTTCCAGG | |
| 287 | CAGAUGAUACCAG | 907 | UGUGGACUUUUCU | 1527 | TGTGGACTTTTCT | Exon 54 |
| | AAAAGUCCACA | | GGUAUCAUCUG | | GGTATCATCTG | |
| 288 | CAGAUGAUACCAG | 908 | AUGUGGACUUUUC | 1528 | ATGTGGACTTTTC | Exon 54 |
| | AAAAGUCCACAU | | UGGUAUCAUCUG | | TGGTATCATCTG | |
| 289 | CUGCCAAUGUCCU | 909 | GUAGCAUCCUGUA | 1529 | GTAGCATCCTGTA | Exon 55 |
| | ACAGGAUGCUAC | | GGACAUUGGCAG | | GGACATTGGCAG | |
| 290 | UGCCAAUGUCCUA | 910 | GUAGCAUCCUGUA | 1530 | GTAGCATCCTGTA | Exon 55 |
| | CAGGAUGCUAC | | GGACAUUGGCA | | GGACATTGGCA | |
| 291 | GCCAAUGUCCUAC | 911 | GUAGCAUCCUGUA | 1531 | GTAGCATCCTGTA | Exon 55 |
| | AGGAUGCUAC | | GGACAUUGGC | | GGACATTGGC | |
| 292 | CCAAUGUCCUACA | 912 | GUAGCAUCCUGUA | 1532 | GTAGCATCCTGTA | Exon 55 |
| | GGAUGCUAC | | GGACAUUGG | | GGACATTGG | |
| 293 | AGGGAGUAAAAGA | 913 | GUUUCAUCAGCUC | 1533 | GTTTCATCAGCTC | Exon 55 |
| | GCUGAUGAAAC | | UUUUACUCCCU | | TTTTACTCCCT | |
| 294 | UGAUGAAACAAUG | 914 | UGACUUACUUGCC | 1534 | TGACTTACTTGCC | Exon 55/intron 55 |
| | GCAAGUAAGUCA | | AUUGUUUCAUCA | | ATTGTTTCATCA | junction |
| 295 | GAUGAAACAAUGG | 915 | UGACUUACUUGCC | 1535 | TGACTTACTTGCC | Exon 55/intron 55 |
| | CAAGUAAGUCA | | AUUGUUUCAUC | | ATTGTTTCATC | junction |
| 296 | CCUGGAAGGUUCC | 916 | CUGCAUCAUCGGA | 1536 | CTGCATCATCGGA | Exon 56 |
| | GAUGAUGCAG | | ACCUUCCAGG | | ACCTTCCAGG | |
| 297 | GGAAGGUUCCGAU | 917 | CUGCAUCAUCGGA | 1537 | CTGCATCATCGGA | Exon 56 |
| | GAUGCAG | | ACCUUCC | | ACCTTCC | |
| 298 | GAUCCAAUUGAAC | 918 | UGCUGAGAAUUGU | 1538 | TGCTGAGAATTGT | Intron 55 |
| | AAUUCUCAGCA | | UCAAUUGGAUC | | TCAATTGGATC | |
| 299 | AGGUUCCGAUGAU | 919 | ACAGGACUGCAUC | 1539 | ACAGGACTGCATC | Exon 56 |
| | GCAGUCCUGU | | AUCGGAACCU | | ATCGGAACCT | |
| 300 | GGUUCCGAUGAUG | 920 | ACAGGACUGCAUC | 1540 | ACAGGACTGCATC | Exon 56 |
| | CAGUCCUGU | | AUCGGAACC | | ATCGGAACC | |
| 301 | CCUGGAAGGUUCC | 921 | ACUGCAUCAUCGG | 1541 | ACTGCATCATCGG | Exon 56 |
| | GAUGAUGCAGU | | AACCUUCCAGG | | AACCTTCCAGG | |
| 302 | CUGGAAGGUUCCG | 922 | ACUGCAUCAUCGG | 1542 | ACTGCATCATCGG | Exon 56 |
| | AUGAUGCAGU | | AACCUUCCAG | | AACCTTCCAG | |
| 303 | GGAAGGUUCCGAU | 923 | ACUGCAUCAUCGG | 1543 | ACTGCATCATCGG | Exon 56 |
| | GAUGCAGU | | AACCUUCC | | AACCTTCC | |
| 304 | GAAGGUUCCGAUG | 924 | ACAGGACUGCAUC | 1544 | ACAGGACTGCATC | Exon 56 |
| | AUGCAGUCCUGU | | AUCGGAACCUUC | | ATCGGAACCTTC | |
| 305 | GGUUCCGAUGAUG | 925 | GUAACAGGACUGC | 1545 | GTAACAGGACTGC | Exon 56 |
| | CAGUCCUGUUAC | | AUCAUCGGAACC | | ATCATCGGAACC | |
| 306 | GUUCCGAUGAUGC | 926 | GUAACAGGACUGC | 1546 | GTAACAGGACTGC | Exon 56 |
| | AGUCCUGUUAC | | AUCAUCGGAAC | | ATCATCGGAAC | |
| 307 | GUGGAUCCAAUUG | 927 | GAGAAUUGUUCAA | 1547 | GAGAATTGTTCAA | Intron 55 |
| | AACAAUUCUC | | UUGGAUCCAC | | TTGGATCCAC | |
| 308 | GGAUCCAAUUGAA | 928 | UGCUGAGAAUUGU | 1548 | TGCTGAGAATTGT | Intron 55 |
| | CAAUUCUCAGCA | | UCAAUUGGAUCC | | TCAATTGGATCC | |
| 309 | GAUCCAAUUGAAC | 929 | AUGCUGAGAAUUG | 1549 | ATGCTGAGAATTG | Intron 55 |
| | AAUUCUCAGCAU | | UUCAAUUGGAUC | | TTCAATTGGATC | |
| 310 | AAGGUUCCGAUGA | 930 | ACAGGACUGCAUC | 1550 | ACAGGACTGCATC | Exon 56 |
| | UGCAGUCCUGU | | AUCGGAACCUU | | ATCGGAACCTT | |
| 311 | AGGUUCCGAUGAU | 931 | GGACUGCAUCAUC | 1551 | GGACTGCATCATC | Exon 56 |
| | GCAGUCC | | GGAACCU | | GGAACCT | |
| 312 | GUGGAUCCAAUUG | 932 | UGAGAAUUGUUCA | 1552 | TGAGAATTGTTCA | Intron 55 |
| | AACAAUUCUCA | | AUUGGAUCCAC | | ATTGGATCCAC | |
| 313 | AGGUUCCGAUGAU | 933 | UAACAGGACUGCA | 1553 | TAACAGGACTGCA | Exon 56 |
| | GCAGUCCUGUUA | | UCAUCGGAACCU | | TCATCGGAACCT | |
| 314 | GGUUCCGAUGAUG | 934 | UAACAGGACUGCA | 1554 | TAACAGGACTGCA | Exon 56 |
| | CAGUCCUGUUA | | UCAUCGGAACC | | TCATCGGAACC | |
| 315 | CUGGAAGGUUCCG | 935 | GGACUGCAUCAUC | 1555 | GGACTGCATCATC | Exon 56 |
| | AUGAUGCAGUCC | | GGAACCUUCCAG | | GGAACCTTCCAG | |
| 316 | UGGAAGGUUCCGA | 936 | GGACUGCAUCAUC | 1556 | GGACTGCATCATC | Exon 56 |
| | UGAUGCAGUCC | | GGAACCUUCCA | | GGAACCTTCCA | |
| 317 | GGAAGGUUCCGAU | 937 | GGACUGCAUCAUC | 1557 | GGACTGCATCATC | Exon 56 |
| | GAUGCAGUCC | | GGAACCUUCC | | GGAACCTTCC | |
| 318 | UGUGGAUCCAAUU | 938 | GAGAAUUGUUCAA | 1558 | GAGAATTGTTCAA | Intron 55 |
| | GAACAAUUCUC | | UUGGAUCCACA | | TTGGATCCACA | |
| 319 | UUGUGGAUCCAAU | 939 | GAGAAUUGUUCAA | 1559 | GAGAATTGTTCAA | Intron 55 |
| | UGAACAAUUCUC | | UUGGAUCCACAA | | TTGGATCCACAA | |
| 320 | UGUGGAUCCAAUU | 940 | UGAGAAUUGUUCA | 1560 | TGAGAATTGTTCA | Intron 55 |
| | GAACAAUUCUCA | | AUUGGAUCCACA | | ATTGGATCCACA | |
| 321 | GUUCCGAUGAUGC | 941 | ACAGGACUGCAUC | 1561 | ACAGGACTGCATC | Exon 56 |
| | AGUCCUGU | | AUCGGAAC | | ATCGGAAC | |
| 322 | UCCGAUGAUGCAG | 942 | UAACAGGACUGCA | 1562 | TAACAGGACTGCA | Exon 56 |
| | UCCUGUUA | | UCAUCGGA | | TCATCGGA | |
| 323 | UCCGAUGAUGCAG | 943 | GUAACAGGACUGC | 1563 | GTAACAGGACTGC | Exon 56 |
| | UCCUGUUAC | | AUCAUCGGA | | ATCATCGGA | |
| 324 | GUUCCGAUGAUGC | 944 | UAACAGGACUGCA | 1564 | TAACAGGACTGCA | Exon 56 |
| | AGUCCUGUUA | | UCAUCGGAAC | | TCATCGGAAC | |
| 325 | UUCCGAUGAUGCA | 945 | GUAACAGGACUGC | 1565 | GTAACAGGACTGC | Exon 56 |
| | GUCCUGUUAC | | AUCAUCGGAA | | ATCATCGGAA | |
| 326 | CUCCAAAUUCACA | 946 | CAAGCGAUGAAUG | 1566 | CAAGCGATGAATG | Intron 55 |
| | UUCAUCGCUUG | | UGAAUUUGGAG | | TGAATTTGGAG | |
| 327 | GAAGGUUCCGAUG | 947 | GGACUGCAUCAUC | 1567 | GGACTGCATCATC | Exon 56 |
| | AUGCAGUCC | | GGAACCUUC | | GGAACCTTC | |
| 328 | AAGGUUCCGAUGA | 948 | GGACUGCAUCAUC | 1568 | GGACTGCATCATC | Exon 56 |
| | UGCAGUCC | | GGAACCUU | | GGAACCTT | |
| 329 | GGAGCUUGGGAGG | 949 | UCGUCUUGAACCC | 1569 | TCGTCTTGAACCC | Intron 54 |
| | GUUCAAGACGA | | UCCCAAGCUCC | | TCCCAAGCTCC | |
| 330 | GGAGCUUGGGAGG | 950 | AUCGUCUUGAACC | 1570 | ATCGTCTTGAACC | Intron 54 |
| | GUUCAAGACGAU | | CUCCCAAGCUCC | | CTCCCAAGCTCC | |
| 331 | UGGCUGUAAUAAU | 951 | CACCACCCCAUUA | 1571 | CACCACCCCATTA | Intron 54 |
| | GGGGUGGUG | | UUACAGCCA | | TTACAGCCA | |
| 332 | UGGCUGUAAUAAU | 952 | UCACCACCCCAUU | 1572 | TCACCACCCCATT | Intron 54 |
| | GGGGUGGUGA | | AUUACAGCCA | | ATTACAGCCA | |
| 333 | GGCUGUAAUAAUG | 953 | UCACCACCCCAUU | 1573 | TCACCACCCCATT | Intron 54 |
| | GGGUGGUGA | | AUUACAGCC | | ATTACAGCC | |
| 334 | GGGGUGGUGAAAC | 954 | CCAUCCAGUUUCA | 1574 | CCATCCAGTTTCA | Intron 54 |
| | UGGAUGG | | CCACCCC | | CCACCCC | |
| 335 | UUGGCUGUAAUAA | 955 | UCACCACCCCAUU | 1575 | TCACCACCCCATT | Intron 54 |
| | UGGGGUGGUGA | | AUUACAGCCAA | | ATTACAGCCAA | |
| 336 | GGGGUGGUGAAAC | 956 | UCCAUCCAGUUUC | 1576 | TCCATCCAGTTTC | Intron 54 |
| | UGGAUGGA | | ACCACCCC | | ACCACCCC | |
| 337 | GCUGUAAUAAUGG | 957 | UCACCACCCCAUU | 1577 | TCACCACCCCATT | Intron 54 |
| | GGUGGUGA | | AUUACAGC | | ATTACAGC | |
| 338 | UGGGGUGGUGAAA | 958 | CCAUCCAGUUUCA | 1578 | CCATCCAGTTTCA | Intron 54 |
| | CUGGAUGG | | CCACCCCA | | CCACCCCA | |
| 339 | UGGCUGUAAUAAU | 959 | UUUCACCACCCCA | 1579 | TTTCACCACCCCA | Intron 54 |
| | GGGGUGGUGAAA | | UUAUUACAGCCA | | TTATTACAGCCA | |
| 340 | GGCUGUAAUAAUG | 960 | UUUCACCACCCCA | 1580 | TTTCACCACCCCA | Intron 54 |
| | GGGUGGUGAAA | | UUAUUACAGCC | | TTATTACAGCC | |
| 341 | UGGGGUGGUGAAA | 961 | CAUCCAGUUUCAC | 1581 | CATCCAGTTTCAC | Intron 54 |
| | CUGGAUG | | CACCCCA | | CACCCCA | |
| 342 | UGGGGUGGUGAAA | 962 | UCCAUCCAGUUUC | 1582 | TCCATCCAGTTTC | Intron 54 |
| | CUGGAUGGA | | ACCACCCCA | | ACCACCCCA | |
| 343 | AUGGCAAGUAAGU | 963 | GGAAAUGCCUGAC | 1583 | GGAAATGCCTGAC | Exon 55/intron 55 |
| | CAGGCAUUUCC | | UUACUUGCCAU | | TTACTTGCCAT | junction |
| 344 | GCUGUAAUAAUGG | 964 | AGUUUCACCACCC | 1584 | AGTTTCACCACCC | Intron 54 |
| | GGUGGUGAAACU | | CAUUAUUACAGC | | CATTATTACAGC | |
| 345 | AUGGGGUGGUGAA | 965 | CAUCCAGUUUCAC | 1585 | CATCCAGTTTCAC | Intron 54 |
| | ACUGGAUG | | CACCCCAU | | CACCCCAT | |
| 346 | AUGGGGUGGUGAA | 966 | CCAUCCAGUUUCA | 1586 | CCATCCAGTTTCA | Intron 54 |
| | ACUGGAUGG | | CCACCCCAU | | CCACCCCAT | |
| 347 | GCAAGUAAGUCAG | 967 | GCGGAAAUGCCUG | 1587 | GCGGAAATGCCTG | Exon 55/intron 55 |
| | GCAUUUCCGC | | ACUUACUUGC | | ACTTACTTGC | junction |
| 348 | GGCUGUAAUAAUG | 968 | GUUUCACCACCCC | 1588 | GTTTCACCACCCC | Intron 54 |
| | GGGUGGUGAAAC | | AUUAUUACAGCC | | ATTATTACAGCC | |
| 349 | AAUGGGGUGGUGA | 969 | CAUCCAGUUUCAC | 1589 | CATCCAGTTTCAC | Intron 54 |
| | AACUGGAUG | | CACCCCAUU | | CACCCCATT | |
| 350 | AUGGGGUGGUGAA | 970 | UCCAUCCAGUUUC | 1590 | TCCATCCAGTTTC | Intron 54 |
| | ACUGGAUGGA | | ACCACCCCAU | | ACCACCCCAT | |
| 351 | UGGCAAGUAAGUC | 971 | GCGGAAAUGCCUG | 591 | GCGGAAATGCCTG | Exon 55/intron 55 |
| | AGGCAUUUCCGC | | ACUUACUUGCCA | | ACTTACTTGCCA | junction |
| 352 | GCUGUAAUAAUGG | 972 | UUUCACCACCCCA | 1592 | TTTCACCACCCCA | Intron 54 |
| | GGUGGUGAAA | | UUAUUACAGC | | TTATTACAGC | |
| 353 | UAAUGGGGUGGUG | 973 | CAUCCAGUUUCAC | 1593 | CATCCAGTTTCAC | Intron 54 |
| | AAACUGGAUG | | CACCCCAUUA | | CACCCCATTA | |
| 354 | UAAUGGGGUGGUG | 974 | CCAUCCAGUUUCA | 1594 | CCATCCAGTTTCA | Intron 54 |
| | AAACUGGAUGG | | CCACCCCAUUA | | CCACCCCATTA | |
| 355 | AAUGGGGUGGUGA | 975 | CCAUCCAGUUUCA | 1595 | CCATCCAGTTTCA | Intron 54 |
| | AACUGGAUGG | | CCACCCCAUU | | CCACCCCATT | |
| 356 | AUGGCAAGUAAGU | 976 | GAAAUGCCUGACU | 1596 | GAAATGCCTGACT | Exon 55/intron 55 |
| | CAGGCAUUUC | | UACUUGCCAU | | TACTTGCCAT | junction |
| 357 | GGCAAGUAAGUCA | 977 | GCGGAAAUGCCUG | 1597 | GCGGAAATGCCTG | Exon 55/intron 55 |
| | GGCAUUUCCGC | | ACUUACUUGCC | | ACTTACTTGCC | junction |
| 358 | GGCAAGUAAGUCA | 978 | AGCGGAAAUGCCU | 1598 | AGCGGAAATGCCT | Exon 55/intron 55 |
| | GGCAUUUCCGCU | | GACUUACUUGCC | | GACTTACTTGCC | junction |
| 359 | AAUGGGGUGGUGA | 979 | UCCAUCCAGUUUC | 1599 | TCCATCCAGTTTC | Intron 54 |
| | AACUGGAUGGA | | ACCACCCCAUU | | ACCACCCCATT | |
| 360 | GGGUGGUGAAACU | 980 | UCCAUCCAGUUUC | 1600 | TCCATCCAGTTTC | Intron 54 |
| | GGAUGGA | | ACCACCC | | ACCACCC | |
| 361 | AUAAUGGGGUGGU | 981 | CAUCCAGUUUCAC | 1601 | CATCCAGTTTCAC | Intron 54 |
| | GAAACUGGAUG | | CACCCCAUUAU | | CACCCCATTAT | |
| 362 | AUAAUGGGGUGGU | 982 | CCAUCCAGUUUCA | 1602 | CCATCCAGTTTCA | Intron 54 |
| | GAAACUGGAUGG | | CCACCCCAUUAU | | CCACCCCATTAT | |
| 363 | UAAUGGGGUGGUG | 983 | UCCAUCCAGUUUC | 1603 | TCCATCCAGTTTC | Intron 54 |
| | AAACUGGAUGGA | | ACCACCCCAUUA | | ACCACCCCATTA | |
| 364 | AAUGGCAAGUAAG | 984 | GAAAUGCCUGACU | 1604 | GAAATGCCTGACT | Exon 55/intron 55 |
| | UCAGGCAUUUC | | UACUUGCCAUU | | TACTTGCCATT | junction |
| 365 | AAUAAUGGGGUGG | 985 | CAUCCAGUUUCAC | 1605 | CATCCAGTTTCAC | Intron 54 |
| | UGAAACUGGAUG | | CACCCCAUUAUU | | CACCCCATTATT | |
| 366 | AAUGGCAAGUAAG | 986 | GGAAAUGCCUGAC | 1606 | GGAAATGCCTGAC | Exon 55/intron 55 |
| | UCAGGCAUUUCC | | UUACUUGCCAUU | | TTACTTGCCATT | junction |
| 367 | UGGCAAGUAAGUC | 987 | GGAAAUGCCUGAC | 1607 | GGAAATGCCTGAC | Exon 55/intron 55 |
| | AGGCAUUUCC | | UUACUUGCCA | | TTACTTGCCA | junction |
| 368 | CCGAUGAUGCAGU | 988 | GUAACAGGACUGC | 1608 | GTAACAGGACTGC | Exon 56 |
| | CCUGUUAC | | AUCAUCGG | | ATCATCGG | |
| 369 | UCCAAAUUCACAU | 989 | ACAAGCGAUGAAU | 1609 | ACAAGCGATGAAT | Intron 55 |
| | UCAUCGCUUGU | | GUGAAUUUGGA | | GTGAATTTGGA | |
| 370 | GUAAUAAUGGGGU | 990 | GUUUCACCACCCC | 1610 | GTTTCACCACCCC | Intron 54 |
| | GGUGAAAC | | AUUAUUAC | | ATTATTAC | |
| 371 | GCUGUAAUAAUGG | 991 | GUUUCACCACCCC | 1611 | GTTTCACCACCCC | Intron 54 |
| | GGUGGUGAAAC | | AUUAUUACAGC | | ATTATTACAGC | |
| 372 | GCUUUGGAAGAAA | 992 | GUAAUCUAUGAGU | 1612 | GTAATCTATGAGT | Exon 55 |
| | CUCAUAGAUUAC | | UUCUUCCAAAGC | | TTCTTCCAAAGC | |
| 373 | UUGGAAGAAACUC | 993 | GCAGUAAUCUAUG | 1613 | GCAGTAATCTATG | Exon 55 |
| | AUAGAUUACUGC | | AGUUUCUUCCAA | | AGTTTCTTCCAA | |
| 374 | UGGAAGAAACUCA | 994 | GCAGUAAUCUAUG | 1614 | GCAGTAATCTATG | Exon 55 |
| | UAGAUUACUGC | | AGUUUCUUCCA | | AGTTTCTTCCA | |
| 375 | UGGAAGAAACUCA | 995 | UGCAGUAAUCUAU | 1615 | TGCAGTAATCTAT | Exon 55 |
| | UAGAUUACUGCA | | GAGUUUCUUCCA | | GAGTTTCTTCCA | |
| 376 | GGAAGAAACUCAU | 996 | GCAGUAAUCUAUG | 1616 | GCAGTAATCTATG | Exon 55 |
| | AGAUUACUGC | | AGUUUCUUCC | | AGTTTCTTCC | |
| 377 | GAAGAAACUCAUA | 997 | UGCAGUAAUCUAU | 1617 | TGCAGTAATCTAT | Exon 55 |
| | GAUUACUGCA | | GAGUUUCUUC | | GAGTTTCTTC | |
| 378 | AAACAACUGCCAA | 998 | UGUAGGACAUUGG | 1618 | TGTAGGACATTGG | Exon 55 |
| | UGUCCUACA | | CAGUUGUUU | | CAGTTGTTT | |
| 379 | AAACAACUGCCAA | 999 | CUGUAGGACAUUG | 1619 | CTGTAGGACATTG | Exon 55 |
| | UGUCCUACAG | | GCAGUUGUUU | | GCAGTTGTTT | |
| 380 | AACAACUGCCAAU | 1000 | GUAGGACAUUGGC | 1620 | GTAGGACATTGGC | Exon 55 |
| | GUCCUAC | | AGUUGUU | | AGTTGTT | |
| 381 | AACAACUGCCAAU | 1001 | UGUAGGACAUUGG | 1621 | TGTAGGACATTGG | Exon 55 |
| | GUCCUACA | | CAGUUGUU | | CAGTTGTT | |
| 382 | CAACUGCCAAUGU | 1002 | CUGUAGGACAUUG | 1622 | CTGTAGGACATTG | Exon 55 |
| | CCUACAG | | GCAGUUG | | GCAGTTG | |
| 383 | AACUGCCAAUGUC | 1003 | CCUGUAGGACAUU | 1623 | CCTGTAGGACATT | Exon 55 |
| | CUACAGG | | GGCAGUU | | GGCAGTT | |
| 384 | GAUGAAAACAGCC | 1004 | GGAUUUUUUGGCU | 1624 | GGATTTTTTGGCT | Exon 56 |
| | AAAAAAUCC | | GUUUUCAUC | | GTTTTCATC | |
| 385 | GAUGAAAACAGCC | 1005 | AGGAUUUUUUGGC | 1625 | AGGATTTTTTGGC | Exon 56 |
| | AAAAAAUCCU | | UGUUUUCAUC | | TGTTTTCATC | |
| 386 | GAUGAAAACAGCC | 1006 | CAGGAUUUUUUGG | 1626 | CAGGATTTTTTGG | Exon 56 |
| | AAAAAAUCCUG | | CUGUUUUCAUC | | CTGTTTTCATC | |
| 387 | GAUGAAAACAGCC | 1007 | UCAGGAUUUUUUG | 1627 | TCAGGATTTTTTG | Exon 56 |
| | AAAAAAUCCUGA | | GCUGUUUUCAUC | | GCTGTTTTCATC | |
| 388 | AUGAAAACAGCCA | 1008 | CUCAGGAUUUUUU | 1628 | CTCAGGATTTTTT | Exon 56 |
| | AAAAAUCCUGAG | | GGCUGUUUUCAU | | GGCTGTTTTCAT | |
| 389 | UGAAAACAGCCAA | 1009 | CUCAGGAUUUUUU | 1629 | CTCAGGATTTTTT | Exon 56 |
| | AAAAUCCUGAG | | GGCUGUUUUCA | | GGCTGTTTTCA | |
| 390 | UGAAAACAGCCAA | 1010 | UCUCAGGAUUUUU | 1630 | TCTCAGGATTTTT | Exon 56 |
| | AAAAUCCUGAGA | | UGGCUGUUUUCA | | TGGCTGTTTTCA | |
| 391 | GAAAACAGCCAAA | 1011 | UCUCAGGAUUUUU | 1631 | TCTCAGGATTTTT | Exon 56 |
| | AAAUCCUGAGA | | UGGCUGUUUUC | | TGGCTGTTTTC | |
| 392 | GAAAACAGCCAAA | 1012 | AUCUCAGGAUUUU | 1632 | ATCTCAGGATTTT | Exon 56 |
| | AAAUCCUGAGAU | | UUGGCUGUUUUC | | TTGGCTGTTTTC | |
| 393 | AAACAGCCAAAAA | 1013 | GAUCUCAGGAUUU | 1633 | GATCTCAGGATTT | Exon 56 |
| | AUCCUGAGAUC | | UUUGGCUGUUU | | TTTGGCTGTTT | |
| 394 | AAACAGCCAAAAA | 1014 | GGAUCUCAGGAUU | 1634 | GGATCTCAGGATT | Exon 56 |
| | AUCCUGAGAUCC | | UUUUGGCUGUUU | | TTTTGGCTGTTT | |
| 395 | AACAGCCAAAAAA | 1015 | GGAUCUCAGGAUU | 1635 | GGATCTCAGGATT | Exon 56 |
| | UCCUGAGAUCC | | UUUUGGCUGUU | | TTTTGGCTGTT | |
| 396 | AACAGCCAAAAAA | 1016 | GGGAUCUCAGGAU | 1636 | GGGATCTCAGGAT | Exon 56 |
| | UCCUGAGAUCCC | | UUUUUGGCUGUU | | TTTTTGGCTGTT | |
| 397 | CCUGAGAUCCCUG | 1017 | GAACCUUCCAGGG | 1637 | GAACCTTCCAGGG | Exon 56 |
| | GAAGGUUC | | AUCUCAGG | | ATCTCAGG | |
| 398 | GAAGAAACUCAUA | 1018 | GUUGCAGUAAUCU | 1638 | GTTGCAGTAATCT | Exon 55 |
| | GAUUACUGCAAC | | AUGAGUUUCUUC | | ATGAGTTTCTTC | |
| 399 | AAGAAACUCAUAG | 1019 | GUUGCAGUAAUCU | 1639 | GTTGCAGTAATCT | Exon 55 |
| | AUUACUGCAAC | | AUGAGUUUCUU | | ATGAGTTTCTT | |
| 400 | AAGAAACUCAUAG | 1020 | UGUUGCAGUAAUC | 1640 | TGTTGCAGTAATC | Exon 55 |
| | AUUACUGCAACA | | UAUGAGUUUCUU | | TATGAGTTTCTT | |
| 401 | AGAAACUCAUAGA | 1021 | GUUGCAGUAAUCU | 1641 | GTTGCAGTAATCT | Exon 55 |
| | UUACUGCAAC | | AUGAGUUUCU | | ATGAGTTTCT | |
| 402 | GAAACUCAUAGAU | 1022 | GUUGCAGUAAUCU | 1642 | GTTGCAGTAATCT | Exon 55 |
| | UACUGCAAC | | AUGAGUUUC | | ATGAGTTTC | |
| 403 | GAAACUCAUAGAU | 1023 | UGUUGCAGUAAUC | 1643 | TGTTGCAGTAATC | Exon 55 |
| | UACUGCAACA | | UAUGAGUUUC | | TATGAGTTTC | |
| 404 | AAACUCAUAGAUU | 1024 | CUGUUGCAGUAAU | 1644 | CTGTTGCAGTAAT | Exon 55 |
| | ACUGCAACAG | | CUAUGAGUUU | | CTATGAGTTT | |
| 405 | AACUCAUAGAUUA | 1025 | GUUGCAGUAAUCU | 1645 | GTTGCAGTAATCT | Exon 55 |
| | CUGCAAC | | AUGAGUU | | ATGAGTT | |
| 406 | AACUCAUAGAUUA | 1026 | UGUUGCAGUAAUC | 1646 | TGTTGCAGTAATC | Exon 55 |
| | CUGCAACA | | UAUGAGUU | | TATGAGTT | |
| 407 | AACUCAUAGAUUA | 1027 | CUGUUGCAGUAAU | 1647 | CTGTTGCAGTAAT | Exon 55 |
| | CUGCAACAG | | CUAUGAGUU | | CTATGAGTT | |
| 408 | ACUCAUAGAUUAC | 1028 | UGUUGCAGUAAUC | 1648 | TGTTGCAGTAATC | Exon 55 |
| | UGCAACA | | UAUGAGU | | TATGAGT | |
| 409 | ACUCAUAGAUUAC | 1029 | CUGUUGCAGUAAU | 1649 | CTGTTGCAGTAAT | Exon 55 |
| | UGCAACAG | | CUAUGAGU | | CTATGAGT | |
| 410 | GAUGAUACCAGAA | 1030 | UGGACUUUUCUGG | 1650 | TGGACTTTTCTGG | Exon 54 |
| | AAGUCCA | | UAUCAUC | | TATCATC | |
| 411 | GAUGAUACCAGAA | 1031 | GUGGACUUUUCUG | 1651 | GTGGACTTTTCTG | Exon 54 |
| | AAGUCCAC | | GUAUCAUC | | GTATCATC | |
| 412 | GAUGAUACCAGAA | 1032 | UGUGGACUUUUCU | 1652 | TGTGGACTTTTCT | Exon 54 |
| | AAGUCCACA | | GGUAUCAUC | | GGTATCATC | |
| 413 | GAUGAUACCAGAA | 1033 | CAUGUGGACUUUU | 1653 | CATGTGGACTTTT | Exon 54 |
| | AAGUCCACAUG | | CUGGUAUCAUC | | CTGGTATCATC | |
| 414 | AUGAUACCAGAAA | 1034 | AUGUGGACUUUUC | 1654 | ATGTGGACTTTTC | Exon 54 |
| | AGUCCACAU | | UGGUAUCAU | | TGGTATCAT | |
| 415 | AUGAUACCAGAAA | 1035 | CAUGUGGACUUUU | 1655 | CATGTGGACTTTT | Exon 54 |
| | AGUCCACAUG | | CUGGUAUCAU | | CTGGTATCAT | |
| 416 | UGAUACCAGAAAA | 1036 | UGUGGACUUUUCU | 1656 | TGTGGACTTTTCT | Exon 54 |
| | GUCCACA | | GGUAUCA | | GGTATCA | |
| 417 | UGAUACCAGAAAA | 1037 | AUGUGGACUUUUC | 1657 | ATGTGGACTTTTC | Exon 54 |
| | GUCCACAU | | UGGUAUCA | | TGGTATCA | |
| 418 | UGAUACCAGAAAA | 1038 | CAUGUGGACUUUU | 1658 | CATGTGGACTTTT | Exon 54 |
| | GUCCACAUG | | CUGGUAUCA | | CTGGTATCA | |
| 419 | UGAUACCAGAAAA | 1039 | UAUCAUGUGGACU | 1659 | TATCATGTGGACT | Exon 54 |
| | GUCCACAUGAUA | | UUUCUGGUAUCA | | TTTCTGGTATCA | |
| 420 | GAUACCAGAAAAG | 1040 | AUGUGGACUUUUC | 1660 | ATGTGGACTTTTC | Exon 54 |
| | UCCACAU | | UGGUAUC | | TGGTATC | |
| 421 | GAUACCAGAAAAG | 1041 | CAUGUGGACUUUU | 1661 | CATGTGGACTTTT | Exon 54 |
| | UCCACAUG | | CUGGUAUC | | CTGGTATC | |
| 422 | GAUACCAGAAAAG | 1042 | UAUCAUGUGGACU | 1662 | TATCATGTGGACT | Exon 54 |
| | UCCACAUGAUA | | UUUCUGGUAUC | | TTTCTGGTATC | |
| 423 | AUACCAGAAAAGU | 1043 | CAUGUGGACUUUU | 1663 | CATGTGGACTTTT | Exon 54 |
| | CCACAUG | | CUGGUAU | | CTGGTAT | |
| 424 | AUACCAGAAAAGU | 1044 | UAUCAUGUGGACU | 1664 | TATCATGTGGACT | Exon 54 |
| | CCACAUGAUA | | UUUCUGGUAU | | TTTCTGGTAT | |
| 425 | AUACCAGAAAAGU | 1045 | UUAUCAUGUGGAC | 1665 | TTATCATGTGGAC | Exon 54 |
| | CCACAUGAUAA | | UUUUCUGGUAU | | TTTTCTGGTAT | |
| 426 | UACCAGAAAAGUC | 1046 | UAUCAUGUGGACU | 1666 | TATCATGTGGACT | Exon 54 |
| | CACAUGAUA | | UUUCUGGUA | | TTTCTGGTA | |
| 427 | ACCAGAAAAGUCC | 1047 | UAUCAUGUGGACU | 1667 | TATCATGTGGACT | Exon 54 |
| | ACAUGAUA | | UUUCUGGU | | TTTCTGGT | |
| 428 | CCAGAAAAGUCCA | 1048 | UAUCAUGUGGACU | 1668 | TATCATGTGGACT | Exon 54 |
| | CAUGAUA | | UUUCUGG | | TTTCTGG | |
| 429 | CAGAAAAGUCCAC | 1049 | UUAUCAUGUGGAC | 1669 | TTATCATGTGGAC | Exon 54 |
| | AUGAUAA | | UUUUCUG | | TTTTCTG | |
| 430 | AGAAAAGUCCACA | 1050 | GUUAUCAUGUGGA | 1670 | GTTATCATGTGGA | Exon 54 |
| | UGAUAAC | | CUUUUCU | | CTTTTCT | |
| 431 | AGAAAAGUCCACA | 1051 | UGUUAUCAUGUGG | 1671 | TGTTATCATGTGG | Exon 54 |
| | UGAUAACA | | ACUUUUCU | | ACTTTTCT | |
| 432 | AGAAAAGUCCACA | 1052 | CUGUUAUCAUGUG | 1672 | CTGTTATCATGTG | Exon 54 |
| | UGAUAACAG | | GACUUUUCU | | GACTTTTCT | |
| 433 | GAAAAGUCCACAU | 1053 | UGUUAUCAUGUGG | 1673 | TGTTATCATGTGG | Exon 54 |
| | GAUAACA | | ACUUUUC | | ACTTTTC | |
| 434 | AAAAGUCCACAUG | 1054 | UCUGUUAUCAUGU | 1674 | TCTGTTATCATGT | Exon 54 |
| | AUAACAGA | | GGACUUUU | | GGACTTTT | |
| 435 | AAAGUCCACAUGA | 1055 | UCUGUUAUCAUGU | 1675 | TCTGTTATCATGT | Exon 54 |
| | UAACAGA | | GGACUUU | | GGACTTT | |
| 436 | AGUCCACAUGAUA | 1056 | UCUCUGUUAUCAU | 1676 | TCTCTGTTATCAT | Exon 54 |
| | ACAGAGA | | GUGGACU | | GTGGACT | |
| 437 | GUCCACAUGAUAA | 1057 | UUCUCUGUUAUCA | 1677 | TTCTCTGTTATCA | Exon 54 |
| | CAGAGAA | | UGUGGAC | | TGTGGAC | |
| 438 | GUCCACAUGAUAA | 1058 | AUUCUCUGUUAUC | 1678 | ATTCTCTGTTATC | Exon 54 |
| | CAGAGAAU | | AUGUGGAC | | ATGTGGAC | |
| 439 | GUCCACAUGAUAA | 1059 | UAUUCUCUGUUAU | 1679 | TATTCTCTGTTAT | Exon 54 |
| | CAGAGAAUA | | CAUGUGGAC | | CATGTGGAC | |
| 440 | GUCCACAUGAUAA | 1060 | AUAUUCUCUGUUA | 1680 | ATATTCTCTGTTA | Exon 54 |
| | CAGAGAAUAU | | UCAUGUGGAC | | TCATGTGGAC | |
| 441 | CCACAUGAUAACA | 1061 | UAUUCUCUGUUAU | 1681 | TATTCTCTGTTAT | Exon 54 |
| | GAGAAUA | | CAUGUGG | | CATGTGG | |
| 442 | GAAGAAACUCAUA | 1062 | UUGCAGUAAUCUA | 1682 | TTGCAGTAATCTA | Exon 55 |
| | GAUUACUGCAA | | UGAGUUUCUUC | | TGAGTTTCTTC | |
| 443 | GAAGCUGAAACAA | 1063 | GGACAUUGGCAGU | 1683 | GGACATTGGCAGT | Exon 55 |
| | CUGCCAAUGUCC | | UGUUUCAGCUUC | | TGTTTCAGCTTC | |
| 444 | AAGCUGAAACAAC | 1064 | GGACAUUGGCAGU | 1684 | GGACATTGGCAGT | Exon 55 |
| | UGCCAAUGUCC | | UGUUUCAGCUU | | TGTTTCAGCTT | |
| 445 | AAGCUGAAACAAC | 1065 | AGGACAUUGGCAG | 1685 | AGGACATTGGCAG | Exon 55 |
| | UGCCAAUGUCCU | | UUGUUUCAGCUU | | TTGTTTCAGCTT | |
| 446 | AGCUGAAACAACU | 1066 | GACAUUGGCAGUU | 1686 | GACATTGGCAGTT | Exon 55 |
| | GCCAAUGUC | | GUUUCAGCU | | GTTTCAGCT | |
| 447 | AGCUGAAACAACU | 1067 | GGACAUUGGCAGU | 1687 | GGACATTGGCAGT | Exon 55 |
| | GCCAAUGUCC | | UGUUUCAGCU | | TGTTTCAGCT | |
| 448 | AGCUGAAACAACU | 1068 | AGGACAUUGGCAG | 1688 | AGGACATTGGCAG | Exon 55 |
| | GCCAAUGUCCU | | UUGUUUCAGCU | | TTGTTTCAGCT | |
| 449 | AGCUGAAACAACU | 1069 | UAGGACAUUGGCA | 1689 | TAGGACATTGGCA | Exon 55 |
| | GCCAAUGUCCUA | | GUUGUUUCAGCU | | GTTGTTTCAGCT | |
| 450 | GCUGAAACAACUG | 1070 | GACAUUGGCAGUU | 1690 | GACATTGGCAGTT | Exon 55 |
| | CCAAUGUC | | GUUUCAGC | | GTTTCAGC | |
| 451 | GCUGAAACAACUG | 1071 | GGACAUUGGCAGU | 1691 | GGACATTGGCAGT | Exon 55 |
| | CCAAUGUCC | | UGUUUCAGC | | TGTTTCAGC | |
| 452 | GCUGAAACAACUG | 1072 | AGGACAUUGGCAG | 1692 | AGGACATTGGCAG | Exon 55 |
| | CCAAUGUCCU | | UUGUUUCAGC | | TTGTTTCAGC | |
| 453 | CAACUGCCAAUGU | 1073 | GCAUCCUGUAGGA | 1693 | GCATCCTGTAGGA | Exon 55 |
| | CCUACAGGAUGC | | CAUUGGCAGUUG | | CATTGGCAGTTG | |
| 454 | AACUGCCAAUGUC | 1074 | GCAUCCUGUAGGA | 1694 | GCATCCTGTAGGA | Exon 55 |
| | CUACAGGAUGC | | CAUUGGCAGUU | | CATTGGCAGTT | |
| 455 | ACUGCCAAUGUCC | 1075 | GCAUCCUGUAGGA | 1695 | GCATCCTGTAGGA | Exon 55 |
| | UACAGGAUGC | | CAUUGGCAGU | | CATTGGCAGT | |
| 456 | CUGCCAAUGUCCU | 1076 | AUCCUGUAGGACA | 1696 | ATCCTGTAGGACA | Exon 55 |
| | ACAGGAU | | UUGGCAG | | TTGGCAG | |
| 457 | CUGCCAAUGUCCU | 1077 | GCAUCCUGUAGGA | 1697 | GCATCCTGTAGGA | Exon 55 |
| | ACAGGAUGC | | CAUUGGCAG | | CATTGGCAG | |
| 458 | UGCCAAUGUCCUA | 1078 | GCAUCCUGUAGGA | 1698 | GCATCCTGTAGGA | Exon 55 |
| | CAGGAUGC | | CAUUGGCA | | CATTGGCA | |
| 459 | GCCAAUGUCCUAC | 1079 | GCAUCCUGUAGGA | 1699 | GCATCCTGTAGGA | Exon 55 |
| | AGGAUGC | | CAUUGGC | | CATTGGC | |
| 460 | CCAAUGUCCUACA | 1080 | AGCAUCCUGUAGG | 1700 | AGCATCCTGTAGG | Exon 55 |
| | GGAUGCU | | ACAUUGG | | ACATTGG | |
| 461 | AGAGCUGAUGAAA | 1081 | CUUGCCAUUGUUU | 1701 | CTTGCCATTGTTT | Exon 55/intron 55 |
| | CAAUGGCAAG | | CAUCAGCUCU | | CATCAGCTCT | junction |
| 462 | AGAGCUGAUGAAA | 1082 | ACUUGCCAUUGUU | 1702 | ACTTGCCATTGTT | Exon 55/intron 55 |
| | CAAUGGCAAGU | | UCAUCAGCUCU | | TCATCAGCTCT | junction |
| 463 | AGAGCUGAUGAAA | 1083 | UACUUGCCAUUGU | 1703 | TACTTGCCATTGT | Exon 55/intron 55 |
| | CAAUGGCAAGUA | | UUCAUCAGCUCU | | TTCATCAGCTCT | junction |
| 464 | GAGCUGAUGAAAC | 1084 | ACUUGCCAUUGUU | 1704 | ACTTGCCATTGTT | Exon 55/intron 55 |
| | AAUGGCAAGU | | UCAUCAGCUC | | TCATCAGCTC | junction |
| 465 | GAGCUGAUGAAAC | 1085 | UACUUGCCAUUGU | 1705 | TACTTGCCATTGT | Exon 55/intron 55 |
| | AAUGGCAAGUA | | UUCAUCAGCUC | | TTCATCAGCTC | junction |
| 466 | GAGCUGAUGAAAC | 1086 | UUACUUGCCAUUG | 1706 | TTACTTGCCATTG | Exon 55/intron 55 |
| | AAUGGCAAGUAA | | UUUCAUCAGCUC | | TTTCATCAGCTC | junction |
| 467 | AGCUGAUGAAACA | 1087 | CUUACUUGCCAUU | 1707 | CTTACTTGCCATT | Exon 55/intron 55 |
| | AUGGCAAGUAAG | | GUUUCAUCAGCU | | GTTTCATCAGCT | junction |
| 468 | GCUGAUGAAACAA | 1088 | CUUACUUGCCAUU | 1708 | CTTACTTGCCATT | Exon 55/intron 55 |
| | UGGCAAGUAAG | | GUUUCAUCAGC | | GTTTCATCAGC | junction |
| 469 | GCUGAUGAAACAA | 1089 | ACUUACUUGCCAU | 1709 | ACTTACTTGCCAT | Exon 55/intron 55 |
| | UGGCAAGUAAGU | | UGUUUCAUCAGC | | TGTTTCATCAGC | junction |
| 470 | CUGAUGAAACAAU | 1090 | ACUUACUUGCCAU | 1710 | ACTTACTTGCCAT | Exon 55/intron 55 |
| | GGCAAGUAAGU | | UGUUUCAUCAG | | TGTTTCATCAG | junction |
| 471 | UAUCACAACCUGG | 1091 | GGCUGUUUUCAUC | 1711 | GGCTGTTTTCATC | Exon 56 |
| | AUGAAAACAGCC | | CAGGUUGUGAUA | | CAGGTTGTGATA | |
| 472 | AUCACAACCUGGA | 1092 | GGCUGUUUUCAUC | 1712 | GGCTGTTTTCATC | Exon 56 |
| | UGAAAACAGCC | | CAGGUUGUGAU | | CAGGTTGTGAT | |
| 473 | AUCACAACCUGGA | 1093 | UGGCUGUUUUCAU | 1713 | TGGCTGTTTTCAT | Exon 56 |
| | UGAAAACAGCCA | | CCAGGUUGUGAU | | CCAGGTTGTGAT | |
| 474 | UCACAACCUGGAU | 1094 | GGCUGUUUUCAUC | 1714 | GGCTGTTTTCATC | Exon 56 |
| | GAAAACAGCC | | CAGGUUGUGA | | CAGGTTGTGA | |
| 475 | UCACAACCUGGAU | 1095 | UGGCUGUUUUCAU | 1715 | TGGCTGTTTTCAT | Exon 56 |
| | GAAAACAGCCA | | CCAGGUUGUGA | | CCAGGTTGTGA | |
| 476 | UCACAACCUGGAU | 1096 | UUGGCUGUUUUCA | 1716 | TTGGCTGTTTTCA | Exon 56 |
| | GAAAACAGCCAA | | UCCAGGUUGUGA | | TCCAGGTTGTGA | |
| 477 | CACAACCUGGAUG | 1097 | UUUGGCUGUUUUC | 1717 | TTTGGCTGTTTTC | Exon 56 |
| | AAAACAGCCAAA | | AUCCAGGUUGUG | | ATCCAGGTTGTG | |
| 478 | ACAACCUGGAUGA | 1098 | UUUUGGCUGUUUU | 1718 | TTTTGGCTGTTTT | Exon 56 |
| | AAACAGCCAAAA | | CAUCCAGGUUGU | | CATCCAGGTTGT | |
| 479 | GGAUGAAAACAGC | 1099 | GAUUUUUUGGCUG | 1719 | GATTTTTTGGCTG | Exon 56 |
| | CAAAAAAUC | | UUUUCAUCC | | TTTTCATCC | |
| 480 | GGAUGAAAACAGC | 1100 | GGAUUUUUUGGCU | 1720 | GGATTTTTTGGCT | Exon 56 |
| | CAAAAAAUCC | | GUUUUCAUCC | | GTTTTCATCC | |
| 481 | GGAUGAAAACAGC | 1101 | AGGAUUUUUUGGC | 1721 | AGGATTTTTTGGC | Exon 56 |
| | CAAAAAAUCCU | | UGUUUUCAUCC | | TGTTTTCATCC | |
| 482 | GGAUGAAAACAGC | 1102 | CAGGAUUUUUUGG | 1722 | CAGGATTTTTTGG | Exon 56 |
| | CAAAAAAUCCUG | | CUGUUUUCAUCC | | CTGTTTTCATCC | |
| 483 | ACAGCCAAAAAAU | 1103 | GGAUCUCAGGAUU | 1723 | GGATCTCAGGATT | Exon 56 |
| | CCUGAGAUCC | | UUUUGGCUGU | | TTTTGGCTGT | |
| 484 | ACAGCCAAAAAAU | 1104 | GGGAUCUCAGGAU | 1724 | GGGATCTCAGGAT | Exon 56 |
| | CCUGAGAUCCC | | UUUUUGGCUGU | | TTTTTGGCTGT | |
| 485 | CCUGAGAUCCCUG | 1105 | UCGGAACCUUCCA | 1725 | TCGGAACCTTCCA | Exon 56 |
| | GAAGGUUCCGA | | GGGAUCUCAGG | | GGGATCTCAGG | |
| 486 | CCUGAGAUCCCUG | 1106 | AUCGGAACCUUCC | 1726 | ATCGGAACCTTCC | Exon 56 |
| | GAAGGUUCCGAU | | AGGGAUCUCAGG | | AGGGATCTCAGG | |
| 487 | CUGAGAUCCCUGG | 1107 | UCGGAACCUUCCA | 1727 | TCGGAACCTTCCA | Exon 56 |
| | AAGGUUCCGA | | GGGAUCUCAG | | GGGATCTCAG | |
| 488 | CUGAGAUCCCUGG | 1108 | AUCGGAACCUUCC | 1728 | ATCGGAACCTTCC | Exon 56 |
| | AAGGUUCCGAU | | AGGGAUCUCAG | | AGGGATCTCAG | |
| 489 | CUGAGAUCCCUGG | 1109 | CAUCGGAACCUUC | 1729 | CATCGGAACCTTC | Exon 56 |
| | AAGGUUCCGAUG | | CAGGGAUCUCAG | | CAGGGATCTCAG | |
| 490 | UGAGAUCCCUGGA | 1110 | UCGGAACCUUCCA | 1730 | TCGGAACCTTCCA | Exon 56 |
| | AGGUUCCGA | | GGGAUCUCA | | GGGATCTCA | |
| 491 | UGAGAUCCCUGGA | 1111 | AUCGGAACCUUCC | 1731 | ATCGGAACCTTCC | Exon 56 |
| | AGGUUCCGAU | | AGGGAUCUCA | | AGGGATCTCA | |
| 492 | UGAGAUCCCUGGA | 1112 | CAUCGGAACCUUC | 1732 | CATCGGAACCTTC | Exon 56 |
| | AGGUUCCGAUG | | CAGGGAUCUCA | | CAGGGATCTCA | |
| 493 | UGAGAUCCCUGGA | 1113 | UCAUCGGAACCUU | 1733 | TCATCGGAACCTT | Exon 56 |
| | AGGUUCCGAUGA | | CCAGGGAUCUCA | | CCAGGGATCTCA | |
| 494 | GAGAUCCCUGGAA | 1114 | UCGGAACCUUCCA | 1734 | TCGGAACCTTCCA | Exon 56 |
| | GGUUCCGA | | GGGAUCUC | | GGGATCTC | |
| 495 | GAGAUCCCUGGAA | 1115 | AUCGGAACCUUCC | 1735 | ATCGGAACCTTCC | Exon 56 |
| | GGUUCCGAU | | AGGGAUCUC | | AGGGATCTC | |
| 496 | GAGAUCCCUGGAA | 1116 | CAUCGGAACCUUC | 1736 | CATCGGAACCTTC | Exon 56 |
| | GGUUCCGAUG | | CAGGGAUCUC | | CAGGGATCTC | |
| 497 | GAGAUCCCUGGAA | 1117 | UCAUCGGAACCUU | 1737 | TCATCGGAACCTT | Exon 56 |
| | GGUUCCGAUGA | | CCAGGGAUCUC | | CCAGGGATCTC | |
| 498 | AGAUCCCUGGAAG | 1118 | CAUCGGAACCUUC | 1738 | CATCGGAACCTTC | Exon 56 |
| | GUUCCGAUG | | CAGGGAUCU | | CAGGGATCT | |
| 499 | AGAUCCCUGGAAG | 1119 | UCAUCGGAACCUU | 1739 | TCATCGGAACCTT | Exon 56 |
| | GUUCCGAUGA | | CCAGGGAUCU | | CCAGGGATCT | |
| 500 | GAUCCCUGGAAGG | 1120 | AUCGGAACCUUCC | 1740 | ATCGGAACCTTCC | Exon 56 |
| | UUCCGAU | | AGGGAUC | | AGGGATC | |
| 501 | GAUCCCUGGAAGG | 1121 | CAUCGGAACCUUC | 1741 | CATCGGAACCTTC | Exon 56 |
| | UUCCGAUG | | CAGGGAUC | | CAGGGATC | |
| 502 | GAUCCCUGGAAGG | 1122 | UCAUCGGAACCUU | 1742 | TCATCGGAACCTT | Exon 56 |
| | UUCCGAUGA | | CCAGGGAUC | | CCAGGGATC | |
| 503 | AUCCCUGGAAGGU | 1123 | UCAUCGGAACCUU | 1743 | TCATCGGAACCTT | Exon 56 |
| | UCCGAUGA | | CCAGGGAU | | CCAGGGAT | |
| 504 | UCCCUGGAAGGUU | 1124 | UCAUCGGAACCUU | 1744 | TCATCGGAACCTT | Exon 56 |
| | CCGAUGA | | CCAGGGA | | CCAGGGA | |
| 505 | AGAUGAUACCAGA | 1125 | UGGACUUUUCUGG | 1745 | TGGACTTTTCTGG | Exon 54 |
| | AAAGUCCA | | UAUCAUCU | | TATCATCT | |
| 506 | AGAUGAUACCAGA | 1126 | GUGGACUUUUCUG | 1746 | GTGGACTTTTCTG | Exon 54 |
| | AAAGUCCAC | | GUAUCAUCU | | GTATCATCT | |
| 507 | AGAUGAUACCAGA | 1127 | CAUGUGGACUUUU | 1747 | CATGTGGACTTTT | Exon 54 |
| | AAAGUCCACAUG | | CUGGUAUCAUCU | | CTGGTATCATCT | |
| 508 | UCCACAUGAUAAC | 1128 | GAUAUUCUCUGUU | 1748 | GATATTCTCTGTT | Exon 54 |
| | AGAGAAUAUC | | AUCAUGUGGA | | ATCATGTGGA | |
| 509 | CUGAAACAACUGC | 1129 | GGACAUUGGCAGU | 1749 | GGACATTGGCAGT | Exon 55 |
| | CAAUGUCC | | UGUUUCAG | | TGTTTCAG | |
| 510 | CUGAAACAACUGC | 1130 | AGGACAUUGGCAG | 1750 | AGGACATTGGCAG | Exon 55 |
| | CAAUGUCCU | | UUGUUUCAG | | TTGTTTCAG | |
| 511 | CUGAAACAACUGC | 1131 | UAGGACAUUGGCA | 1751 | TAGGACATTGGCA | Exon 55 |
| | CAAUGUCCUA | | GUUGUUUCAG | | GTTGTTTCAG | |
| 512 | UGCCAAUGUCCUA | 1132 | CAUCCUGUAGGAC | 1752 | CATCCTGTAGGAC | Exon 55 |
| | CAGGAUG | | AUUGGCA | | ATTGGCA | |
| 513 | CCAAUGUCCUACA | 1133 | UAGCAUCCUGUAG | 1753 | TAGCATCCTGTAG | Exon 55 |
| | GGAUGCUA | | GACAUUGG | | GACATTGG | |
| 514 | CCAAUGUCCUACA | 1134 | GGUAGCAUCCUGU | 1754 | GGTAGCATCCTGT | Exon 55 |
| | GGAUGCUACC | | AGGACAUUGG | | AGGACATTGG | |
| 515 | CUCCAAGGGAGUA | 1135 | AUCAGCUCUUUUA | 1755 | ATCAGCTCTTTTA | Exon 55 |
| | AAAGAGCUGAU | | CUCCCUUGGAG | | CTCCCTTGGAG | |
| 516 | UCCAAGGGAGUAA | 1136 | UCAGCUCUUUUAC | 1756 | TCAGCTCTTTTAC | Exon 55 |
| | AAGAGCUGA | | UCCCUUGGA | | TCCCTTGGA | |
| 517 | UCCAAGGGAGUAA | 1137 | AUCAGCUCUUUUA | 1757 | ATCAGCTCTTTTA | Exon 55 |
| | AAGAGCUGAU | | CUCCCUUGGA | | CTCCCTTGGA | |
| 518 | CCAAGGGAGUAAA | 1138 | CAGCUCUUUUACU | 1758 | CAGCTCTTTTACT | Exon 55 |
| | AGAGCUG | | CCCUUGG | | CCCTTGG | |
| 519 | CCAAGGGAGUAAA | 1139 | UUCAUCAGCUCUU | 1759 | TTCATCAGCTCTT | Exon 55 |
| | AGAGCUGAUGAA | | UUACUCCCUUGG | | TTACTCCCTTGG | |
| 520 | CAAGGGAGUAAAA | 1140 | CAUCAGCUCUUUU | 1760 | CATCAGCTCTTTT | Exon 55 |
| | GAGCUGAUG | | ACUCCCUUG | | ACTCCCTTG | |
| 521 | CAAGGGAGUAAAA | 1141 | UUUCAUCAGCUCU | 1761 | TTTCATCAGCTCT | Exon 55 |
| | GAGCUGAUGAAA | | UUUACUCCCUUG | | TTTACTCCCTTG | |
| 522 | AGGGAGUAAAAGA | 1142 | UCAUCAGCUCUUU | 1762 | TCATCAGCTCTTT | Exon 55 |
| | GCUGAUGA | | UACUCCCU | | TACTCCCT | |
| 523 | AGGGAGUAAAAGA | 1143 | UUCAUCAGCUCUU | 1763 | TTCATCAGCTCTT | Exon 55 |
| | GCUGAUGAA | | UUACUCCCU | | TTACTCCCT | |
| 524 | AAGAGCUGAUGAA | 1144 | UUGCCAUUGUUUC | 1764 | TTGCCATTGTTTC | Exon 55 |
| | ACAAUGGCAA | | AUCAGCUCUU | | ATCAGCTCTT | |
| 525 | AAGAGCUGAUGAA | 1145 | CUUGCCAUUGUUU | 1765 | CTTGCCATTGTTT | Exon 55/intron 55 |
| | ACAAUGGCAAG | | CAUCAGCUCUU | | CATCAGCTCTT | junction |
| 526 | AAGAGCUGAUGAA | 1146 | ACUUGCCAUUGUU | 1766 | ACTTGCCATTGTT | Exon 55/intron 55 |
| | ACAAUGGCAAGU | | UCAUCAGCUCUU | | TCATCAGCTCTT | junction |
| 527 | AUGAAACAAUGGC | 1147 | GACUUACUUGCCA | 1767 | GACTTACTTGCCA | Exon 55/intron 55 |
| | AAGUAAGUC | | UUGUUUCAU | | TTGTTTCAT | junction |
| 528 | UCCAAGGUGAAAU | 1148 | GUGUGAGCUUCAA | 1768 | GTGTGAGCTTCAA | Exon 56 |
| | UGAAGCUCACAC | | UUUCACCUUGGA | | TTTCACCTTGGA | |
| 529 | CCAAGGUGAAAUU | 1149 | GUGUGAGCUUCAA | 1769 | GTGTGAGCTTCAA | Exon 56 |
| | GAAGCUCACAC | | UUUCACCUUGG | | TTTCACCTTGG | |
| 530 | CCAAGGUGAAAUU | 1150 | UGUGUGAGCUUCA | 1770 | TGTGTGAGCTTCA | Exon 56 |
| | GAAGCUCACACA | | AUUUCACCUUGG | | ATTTCACCTTGG | |
| 531 | CAAGGUGAAAUUG | 1151 | CUGUGUGAGCUUC | 1771 | CTGTGTGAGCTTC | Exon 56 |
| | AAGCUCACACAG | | AAUUUCACCUUG | | AATTTCACCTTG | |
| 532 | AAGGUGAAAUUGA | 1152 | UCUGUGUGAGCUU | 1772 | TCTGTGTGAGCTT | Exon 56 |
| | AGCUCACACAGA | | CAAUUUCACCUU | | CAATTTCACCTT | |
| 533 | AGGUGAAAUUGAA | 1153 | UCUGUGUGAGCUU | 1773 | TCTGTGTGAGCTT | Exon 56 |
| | GCUCACACAGA | | CAAUUUCACCU | | CAATTTCACCT | |
| 534 | AGGUGAAAUUGAA | 1154 | AUCUGUGUGAGCU | 1774 | ATCTGTGTGAGCT | Exon 56 |
| | GCUCACACAGAU | | UCAAUUUCACCU | | TCAATTTCACCT | |
| 535 | UUAUCACAACCUG | 1155 | GCUGUUUUCAUCC | 1775 | GCTGTTTTCATCC | Exon 56 |
| | GAUGAAAACAGC | | AGGUUGUGAUAA | | AGGTTGTGATAA | |
| 536 | UGGAUGAAAACAG | 1156 | GGAUUUUUUGGCU | 1776 | GGATTTTTTGGCT | Exon 56 |
| | CCAAAAAAUCC | | GUUUUCAUCCA | | GTTTTCATCCA | |
| 537 | UGGAUGAAAACAG | 1157 | AGGAUUUUUUGGC | 1777 | AGGATTTTTTGGC | Exon 56 |
| | CCAAAAAAUCCU | | UGUUUUCAUCCA | | TGTTTTCATCCA | |
| 538 | CCUGAGAUCCCUG | 1158 | CGGAACCUUCCAG | 1778 | CGGAACCTTCCAG | Exon 56 |
| | GAAGGUUCCG | | GGAUCUCAGG | | GGATCTCAGG | |
| 539 | CUGAGAUCCCUGG | 1159 | CGGAACCUUCCAG | 1779 | CGGAACCTTCCAG | Exon 56 |
| | AAGGUUCCG | | GGAUCUCAG | | GGATCTCAG | |
| 540 | GAGAUCCCUGGAA | 1160 | AUCAUCGGAACCU | 1780 | ATCATCGGAACCT | Exon 56 |
| | GGUUCCGAUGAU | | UCCAGGGAUCUC | | TCCAGGGATCTC | |
| 541 | AGAUCCCUGGAAG | 1161 | AUCAUCGGAACCU | 1781 | ATCATCGGAACCT | Exon 56 |
| | GUUCCGAUGAU | | UCCAGGGAUCU | | TCCAGGGATCT | |
| 542 | GAUCCCUGGAAGG | 1162 | AUCAUCGGAACCU | 1782 | ATCATCGGAACCT | Exon 56 |
| | UUCCGAUGAU | | UCCAGGGAUC | | TCCAGGGATC | |
| 543 | GAUCCCUGGAAGG | 1163 | GCAUCAUCGGAAC | 1783 | GCATCATCGGAAC | Exon 56 |
| | UUCCGAUGAUGC | | CUUCCAGGGAUC | | CTTCCAGGGATC | |
| 544 | AUCCCUGGAAGGU | 1164 | AUCAUCGGAACCU | 1784 | ATCATCGGAACCT | Exon 56 |
| | UCCGAUGAU | | UCCAGGGAU | | TCCAGGGAT | |
| 545 | AUCCCUGGAAGGU | 1165 | GCAUCAUCGGAAC | 1785 | GCATCATCGGAAC | Exon 56 |
| | UCCGAUGAUGC | | CUUCCAGGGAU | | CTTCCAGGGAT | |
| 546 | AUCCCUGGAAGGU | 1166 | UGCAUCAUCGGAA | 1786 | TGCATCATCGGAA | Exon 56 |
| | UCCGAUGAUGCA | | CCUUCCAGGGAU | | CCTTCCAGGGAT | |
| 547 | UCCCUGGAAGGUU | 1167 | AUCAUCGGAACCU | 1787 | ATCATCGGAACCT | Exon 56 |
| | CCGAUGAU | | UCCAGGGA | | TCCAGGGA | |
| 548 | UCCCUGGAAGGUU | 1168 | GCAUCAUCGGAAC | 1788 | GCATCATCGGAAC | Exon 56 |
| | CCGAUGAUGC | | CUUCCAGGGA | | CTTCCAGGGA | |
| 549 | UCCCUGGAAGGUU | 1169 | UGCAUCAUCGGAA | 1789 | TGCATCATCGGAA | Exon 56 |
| | CCGAUGAUGCA | | CCUUCCAGGGA | | CCTTCCAGGGA | |
| 550 | CCCUGGAAGGUUC | 1170 | GCAUCAUCGGAAC | 1790 | GCATCATCGGAAC | Exon 56 |
| | CGAUGAUGC | | CUUCCAGGG | | CTTCCAGGG | |
| 551 | CCCUGGAAGGUUC | 1171 | UGCAUCAUCGGAA | 1791 | TGCATCATCGGAA | Exon 56 |
| | CGAUGAUGCA | | CCUUCCAGGG | | CCTTCCAGGG | |
| 552 | CUGGAAGGUUCCG | 1172 | GCAUCAUCGGAAC | 1792 | GCATCATCGGAAC | Exon 56 |
| | AUGAUGC | | CUUCCAG | | CTTCCAG | |
| 553 | CUGGAAGGUUCCG | 1173 | UGCAUCAUCGGAA | 1793 | TGCATCATCGGAA | Exon 56 |
| | AUGAUGCA | | CCUUCCAG | | CCTTCCAG | |
| 554 | UGGAAGGUUCCGA | 1174 | UGCAUCAUCGGAA | 1794 | TGCATCATCGGAA | Exon 56 |
| | UGAUGCA | | CCUUCCA | | CCTTCCA | |
| 555 | GGCUUACAGAAGC | 1175 | GCAGUUGUUUCAG | 1795 | GCAGTTGTTTCAG | Exon 55 |
| | UGAAACAACUGC | | CUUCUGUAAGCC | | CTTCTGTAAGCC | |
| 556 | GGGAGUAAAAGAG | 1176 | UUUCAUCAGCUCU | 1796 | TTTCATCAGCTCT | Exon 55 |
| | CUGAUGAAA | | UUUACUCCC | | TTTACTCCC | |
| 557 | GGGAGUAAAAGAG | 1177 | GUUUCAUCAGCUC | 1797 | GTTTCATCAGCTC | Exon 55 |
| | CUGAUGAAAC | | UUUUACUCCC | | TTTTACTCCC | |
| 558 | AAAAGAGCUGAUG | 1178 | UUGCCAUUGUUUC | 1798 | TTGCCATTGTTTC | Exon 55 |
| | AAACAAUGGCAA | | AUCAGCUCUUUU | | ATCAGCTCTTTT | |
| 559 | AGGUUCCGAUGAU | 1179 | AGGACUGCAUCAU | 1799 | AGGACTGCATCAT | Exon 56 |
| | GCAGUCCU | | CGGAACCU | | CGGAACCT | |
| 560 | AGGUUCCGAUGAU | 1180 | CAGGACUGCAUCA | 1800 | CAGGACTGCATCA | Exon 56 |
| | GCAGUCCUG | | UCGGAACCU | | TCGGAACCT | |
| 561 | GGUUCCGAUGAUG | 1181 | AGGACUGCAUCAU | 1801 | AGGACTGCATCAT | Exon 56 |
| | CAGUCCU | | CGGAACC | | CGGAACC | |
| 562 | GGUUCCGAUGAUG | 1182 | CAGGACUGCAUCA | 1802 | CAGGACTGCATCA | Exon 56 |
| | CAGUCCUG | | UCGGAACC | | TCGGAACC | |
| 563 | CAGAUGAUACCAG | 1183 | GGACUUUUCUGGU | 1803 | GGACTTTTCTGGT | Exon 54 |
| | AAAAGUCC | | AUCAUCUG | | ATCATCTG | |
| 564 | CAGAUGAUACCAG | 1184 | UGGACUUUUCUGG | 1804 | TGGACTTTTCTGG | Exon 54 |
| | AAAAGUCCA | | UAUCAUCUG | | TATCATCTG | |
| 565 | CAGAUGAUACCAG | 1185 | GUGGACUUUUCUG | 1805 | GTGGACTTTTCTG | Exon 54 |
| | AAAAGUCCAC | | GUAUCAUCUG | | GTATCATCTG | |
| 566 | CAAUGUCCUACAG | 1186 | GUAGCAUCCUGUA | 1806 | GTAGCATCCTGTA | Exon 55 |
| | GAUGCUAC | | GGACAUUG | | GGACATTG | |
| 567 | AAGGGAGUAAAAG | 1187 | UCAUCAGCUCUUU | 1807 | TCATCAGCTCTTT | Exon 55 |
| | AGCUGAUGA | | UACUCCCUU | | TACTCCCTT | |
| 568 | AAGGGAGUAAAAG | 1188 | UUCAUCAGCUCUU | 1808 | TTCATCAGCTCTT | Exon 55 |
| | AGCUGAUGAA | | UUACUCCCUU | | TTACTCCCTT | |
| 569 | AAGGGAGUAAAAG | 1189 | UUUCAUCAGCUCU | 1809 | TTTCATCAGCTCT | Exon 55 |
| | AGCUGAUGAAA | | UUUACUCCCUU | | TTTACTCCCTT | |
| 570 | AAGGGAGUAAAAG | 1190 | GUUUCAUCAGCUC | 1810 | GTTTCATCAGCTC | Exon 55 |
| | AGCUGAUGAAAC | | UUUUACUCCCUU | | TTTTACTCCCTT | |
| 571 | AAAGAGCUGAUGA | 1191 | UGCCAUUGUUUCA | 1811 | TGCCATTGTTTCA | Exon 55 |
| | AACAAUGGCA | | UCAGCUCUUU | | TCAGCTCTTT | |
| 572 | AAAGAGCUGAUGA | 1192 | UUGCCAUUGUUUC | 1812 | TTGCCATTGTTTC | Exon 55 |
| | AACAAUGGCAA | | AUCAGCUCUUU | | ATCAGCTCTTT | |
| 573 | AAAGAGCUGAUGA | 1193 | CUUGCCAUUGUUU | 1813 | CTTGCCATTGTTT | Exon 55/intron 55 |
| | AACAAUGGCAAG | | CAUCAGCUCUUU | | CATCAGCTCTTT | junction |
| 574 | AUGAAACAAUGGC | 1194 | UGACUUACUUGCC | 1814 | TGACTTACTTGCC | Exon 55/intron 55 |
| | AAGUAAGUCA | | AUUGUUUCAU | | ATTGTTTCAT | junction |
| 575 | CCAGGGACAAAAC | 1195 | GCAACUAUUUUGU | 1815 | GCAACTATTTTGT | Intron 55 |
| | AAAAUAGUUGC | | UUUGUCCCUGG | | TTTGTCCCTGG | |
| 576 | GCAAUUCUCCAAA | 1196 | GAAUGUGAAUUUG | 1816 | GAATGTGAATTTG | Intron 55 |
| | UUCACAUUC | | GAGAAUUGC | | GAGAATTGC | |
| 577 | CAAUUCUCCAAAU | 1197 | UGAAUGUGAAUUU | 1817 | TGAATGTGAATTT | Intron 55 |
| | UCACAUUCA | | GGAGAAUUG | | GGAGAATTG | |
| 578 | AUUCUCCAAAUUC | 1198 | GAUGAAUGUGAAU | 1818 | GATGAATGTGAAT | Intron 55 |
| | ACAUUCAUC | | UUGGAGAAU | | TTGGAGAAT | |
| 579 | GGUGAAAUUGAAG | 1199 | CAUCUGUGUGAGC | 1819 | CATCTGTGTGAGC | Exon 56 |
| | CUCACACAGAUG | | UUCAAUUUCACC | | TTCAATTTCACC | |
| 580 | CUCACACAGAUGU | 1200 | AGGUUGUGAUAAA | 1820 | AGGTTGTGATAAA | Exon 56 |
| | UUAUCACAACCU | | CAUCUGUGUGAG | | CATCTGTGTGAG | |
| 581 | ACAACCUGGAUGA | 1201 | GGCUGUUUUCAUC | 1821 | GGCTGTTTTCATC | Exon 56 |
| | AAACAGCC | | CAGGUUGU | | CAGGTTGT | |
| 582 | ACAACCUGGAUGA | 1202 | UGGCUGUUUUCAU | 1822 | TGGCTGTTTTCAT | Exon 56 |
| | AAACAGCCA | | CCAGGUUGU | | CCAGGTTGT | |
| 583 | ACAACCUGGAUGA | 1203 | UUGGCUGUUUUCA | 1823 | TTGGCTGTTTTCA | Exon 56 |
| | AAACAGCCAA | | UCCAGGUUGU | | TCCAGGTTGT | |
| 584 | CUGGAUGAAAACA | 1204 | GGAUUUUUUGGCU | 1824 | GGATTTTTTGGCT | Exon 56 |
| | GCCAAAAAAUCC | | GUUUUCAUCCAG | | GTTTTCATCCAG | |
| 585 | AGAUCCCUGGAAG | 1205 | CAUCAUCGGAACC | 1825 | CATCATCGGAACC | Exon 56 |
| | GUUCCGAUGAUG | | UUCCAGGGAUCU | | TTCCAGGGATCT | |
| 586 | GAUCCCUGGAAGG | 1206 | CAUCAUCGGAACC | 1826 | CATCATCGGAACC | Exon 56 |
| | UUCCGAUGAUG | | UUCCAGGGAUC | | TTCCAGGGATC | |
| 587 | AUCCCUGGAAGGU | 1207 | CAUCAUCGGAACC | 1827 | CATCATCGGAACC | Exon 56 |
| | UCCGAUGAUG | | UUCCAGGGAU | | TTCCAGGGAT | |
| 588 | UCCCUGGAAGGUU | 1208 | CAUCAUCGGAACC | 1828 | CATCATCGGAACC | Exon 56 |
| | CCGAUGAUG | | UUCCAGGGA | | TTCCAGGGA | |
| 589 | UCCCUGGAAGGUU | 1209 | CUGCAUCAUCGGA | 1829 | CTGCATCATCGGA | Exon 56 |
| | CCGAUGAUGCAG | | ACCUUCCAGGGA | | ACCTTCCAGGGA | |
| 590 | CCCUGGAAGGUUC | 1210 | CAUCAUCGGAACC | 1830 | CATCATCGGAACC | Exon 56 |
| | CGAUGAUG | | UUCCAGGG | | TTCCAGGG | |
| 591 | CCCUGGAAGGUUC | 1211 | CUGCAUCAUCGGA | 1831 | CTGCATCATCGGA | Exon 56 |
| | CGAUGAUGCAG | | ACCUUCCAGGG | | ACCTTCCAGGG | |
| 592 | CUGGAAGGUUCCG | 1212 | CUGCAUCAUCGGA | 1832 | CTGCATCATCGGA | Exon 56 |
| | AUGAUGCAG | | ACCUUCCAG | | ACCTTCCAG | |
| 593 | UGGAAGGUUCCGA | 1213 | CUGCAUCAUCGGA | 1833 | CTGCATCATCGGA | Exon 56 |
| | UGAUGCAG | | ACCUUCCA | | ACCTTCCA | |
| 594 | GAUGAUGCAGUCC | 1214 | GUCUUUGUAACAG | 1834 | GTCTTTGTAACAG | Exon 56 |
| | UGUUACAAAGAC | | GACUGCAUCAUC | | GACTGCATCATC | |
| 595 | GCUUACAGAAGCU | 1215 | GGCAGUUGUUUCA | 1835 | GGCAGTTGTTTCA | Exon 55 |
| | GAAACAACUGCC | | GCUUCUGUAAGC | | GCTTCTGTAAGC | |
| 596 | GGGAGUAAAAGAG | 1216 | UGUUUCAUCAGCU | 1836 | TGTTTCATCAGCT | Exon 55 |
| | CUGAUGAAACA | | CUUUUACUCCC | | CTTTTACTCCC | |
| 597 | GAGUAAAAGAGCU | 1217 | CAUUGUUUCAUCA | 1837 | CATTGTTTCATCA | Exon 55 |
| | GAUGAAACAAUG | | GCUCUUUUACUC | | GCTCTTTTACTC | |
| 598 | UAAAAGAGCUGAU | 1218 | GCCAUUGUUUCAU | 1838 | GCCATTGTTTCAT | Exon 55 |
| | GAAACAAUGGC | | CAGCUCUUUUA | | CAGCTCTTTTA | |
| 599 | GAUCCAAUUGAAC | 1219 | GCUGAGAAUUGUU | 1839 | GCTGAGAATTGTT | Intron 55 |
| | AAUUCUCAGC | | CAAUUGGAUC | | CAATTGGATC | |
| 600 | AAGGUUCCGAUGA | 1220 | CAGGACUGCAUCA | 1840 | CAGGACTGCATCA | Exon 56 |
| | UGCAGUCCUG | | UCGGAACCUU | | TCGGAACCTT | |
| 601 | CAAGGGAGUAAAA | 1221 | UCAGCUCUUUUAC | 1841 | TCAGCTCTTTTAC | Exon 55 |
| | GAGCUGA | | UCCCUUG | | TCCCTTG | |
| 602 | AGGGAGUAAAAGA | 1222 | UGUUUCAUCAGCU | 1842 | TGTTTCATCAGCT | Exon 55 |
| | GCUGAUGAAACA | | CUUUUACUCCCU | | CTTTTACTCCCT | |
| 603 | GCCAGGGACAAAA | 1223 | GCAACUAUUUUGU | 1843 | GCAACTATTTTGT | Intron 55 |
| | CAAAAUAGUUGC | | UUUGUCCCUGGC | | TTTGTCCCTGGC | |
| 604 | UGCAAUUCUCCAA | 1224 | GAAUGUGAAUUUG | 1844 | GAATGTGAATTTG | Intron 55 |
| | AUUCACAUUC | | GAGAAUUGCA | | GAGAATTGCA | |
| 605 | GCAAUUCUCCAAA | 1225 | UGAAUGUGAAUUU | 1843 | TGAATGTGAATTT | Intron 55 |
| | UUCACAUUCA | | GGAGAAUUGC | | GGAGAATTGC | |
| 606 | AAUUCUCCAAAUU | 1226 | GAUGAAUGUGAAU | 1846 | GATGAATGTGAAT | Intron 55 |
| | CACAUUCAUC | | UUGGAGAAUU | | TTGGAGAATT | |
| 607 | AUUCUCCAAAUUC | 1227 | CGAUGAAUGUGAA | 1847 | CGATGAATGTGAA | Intron 55 |
| | ACAUUCAUCG | | UUUGGAGAAU | | TTTGGAGAAT | |
| 608 | UUCUCCAAAUUCA | 1228 | CGAUGAAUGUGAA | 1848 | CGATGAATGTGAA | Intron 55 |
| | CAUUCAUCG | | UUUGGAGAA | | TTTGGAGAA | |
| 609 | UCUCCAAAUUCAC | 1229 | CGAUGAAUGUGAA | 1849 | CGATGAATGTGAA | Intron 55 |
| | AUUCAUCG | | UUUGGAGA | | TTTGGAGA | |
| 610 | GGUAAUUCUGCAC | 1230 | GAAGAAGAAUAUG | 1850 | GAAGAAGAATATG | Intron 55 |
| | AUAUUCUUCUUC | | UGCAGAAUUACC | | TGCAGAATTACC | |
| 611 | GCUCACACAGAUG | 1231 | GGUUGUGAUAAAC | 1851 | GGTTGTGATAAAC | Exon 56 |
| | UUUAUCACAACC | | AUCUGUGUGAGC | | ATCTGTGTGAGC | |
| 612 | UCACAACCUGGAU | 1232 | CUGUUUUCAUCCA | 1852 | CTGTTTTCATCCA | Exon 56 |
| | GAAAACAG | | GGUUGUGA | | GGTTGTGA | |
| 613 | CACAACCUGGAUG | 1233 | GGCUGUUUUCAUC | 1853 | GGCTGTTTTCATC | Exon 56 |
| | AAAACAGCC | | CAGGUUGUG | | CAGGTTGTG | |
| 614 | CACAACCUGGAUG | 1234 | UGGCUGUUUUCAU | 1854 | TGGCTGTTTTCAT | Exon 56 |
| | AAAACAGCCA | | CCAGGUUGUG | | CCAGGTTGTG | |
| 615 | CACAACCUGGAUG | 1235 | UUGGCUGUUUUCA | 1855 | TTGGCTGTTTTCA | Exon 56 |
| | AAAACAGCCAA | | UCCAGGUUGUG | | TCCAGGTTGTG | |
| 616 | ACAACCUGGAUGA | 1236 | UUUGGCUGUUUUC | 1856 | TTTGGCTGTTTTC | Exon 56 |
| | AAACAGCCAAA | | AUCCAGGUUGU | | ATCCAGGTTGT | |
| 617 | CCUGGAUGAAAAC | 1237 | GAUUUUUUGGCUG | 1857 | GATTTTTTGGCTG | Exon 56 |
| | AGCCAAAAAAUC | | UUUUCAUCCAGG | | TTTTCATCCAGG | |
| 618 | CCCUGGAAGGUUC | 1238 | ACUGCAUCAUCGG | 1858 | ACTGCATCATCGG | Exon 56 |
| | CGAUGAUGCAGU | | AACCUUCCAGGG | | AACCTTCCAGGG | |
| 619 | UGGAAGGUUCCGA | 1239 | ACUGCAUCAUCGG | 1859 | ACTGCATCATCGG | Exon 56 |
| | UGAUGCAGU | | AACCUUCCA | | AACCTTCCA | |
| 620 | UGGAAGGUUCCGA | 1240 | AGGACUGCAUCAU | 1860 | AGGACTGCATCAT | Exon 56 |
| | UGAUGCAGUCCU | | CGGAACCUUCCA | | CGGAACCTTCCA | |
| 621 | GGAAGGUUCCGAU | 1241 | AGGACUGCAUCAU | 1861 | AGGACTGCATCAT | Exon 56 |
| | GAUGCAGUCCU | | CGGAACCUUCC | | CGGAACCTTCC | |
| 622 | GGAAGGUUCCGAU | 1242 | CAGGACUGCAUCA | 1862 | CAGGACTGCATCA | Exon 56 |
| | GAUGCAGUCCUG | | UCGGAACCUUCC | | TCGGAACCTTCC | |
| 623 | GAAGGUUCCGAUG | 1243 | ACUGCAUCAUCGG | 1863 | ACTGCATCATCGG | Exon 56 |
| | AUGCAGU | | AACCUUC | | AACCTTC | |
| 624 | GUUCCGAUGAUGC | 1244 | UGUAACAGGACUG | 1864 | TGTAACAGGACTG | Exon 56 |
| | AGUCCUGUUACA | | CAUCAUCGGAAC | | CATCATCGGAAC | |
| 625 | GGGAGUAAAAGAG | 1245 | UUGUUUCAUCAGC | 1865 | TTGTTTCATCAGC | Exon 55 |
| | CUGAUGAAACAA | | UCUUUUACUCCC | | TCTTTTACTCCC | |
| 626 | GGAUCCAAUUGAA | 1246 | GCUGAGAAUUGUU | 1866 | GCTGAGAATTGTT | Intron 55 |
| | CAAUUCUCAGC | | CAAUUGGAUCC | | CAATTGGATCC | |
| 627 | GAAGGUUCCGAUG | 1247 | CAGGACUGCAUCA | 1867 | CAGGACTGCATCA | Exon 56 |
| | AUGCAGUCCUG | | UCGGAACCUUC | | TCGGAACCTTC | |
| 628 | AGGUUCCGAUGAU | 1248 | AACAGGACUGCAU | 1868 | AACAGGACTGCAT | Exon 56 |
| | GCAGUCCUGUU | | CAUCGGAACCU | | CATCGGAACCT | |
| 629 | GGUUCCGAUGAUG | 1249 | AACAGGACUGCAU | 1869 | AACAGGACTGCAT | Exon 56 |
| | CAGUCCUGUU | | CAUCGGAACC | | CATCGGAACC | |
| 630 | CAAGGGAGUAAAA | 1250 | AUCAGCUCUUUUA | 1870 | ATCAGCTCTTTTA | Exon 55 |
| | GAGCUGAU | | CUCCCUUG | | CTCCCTTG | |
| 631 | AGCACUCUUGUGG | 1251 | GUUCAAUUGGAUC | 1871 | GTTCAATTGGATC | Intron 55 |
| | AUCCAAUUGAAC | | CACAAGAGUGCU | | CACAAGAGTGCT | |
| 632 | GCCAGGGACAAAA | 1252 | CUAUUUUGUUUUG | 1872 | CTATTTTGTTTTG | Intron 55 |
| | CAAAAUAG | | UCCCUGGC | | TCCCTGGC | |
| 633 | UUGCAAUUCUCCA | 1253 | GAAUGUGAAUUUG | 1873 | GAATGTGAATTTG | Intron 55 |
| | AAUUCACAUUC | | GAGAAUUGCAA | | GAGAATTGCAA | |
| 634 | UGCAAUUCUCCAA | 1254 | UGAAUGUGAAUUU | 1874 | TGAATGTGAATTT | Intron 55 |
| | AUUCACAUUCA | | GGAGAAUUGCA | | GGAGAATTGCA | |
| 635 | GCAAUUCUCCAAA | 1255 | AUGAAUGUGAAUU | 1875 | ATGAATGTGAATT | Intron 55 |
| | UUCACAUUCAU | | UGGAGAAUUGC | | TGGAGAATTGC | |
| 636 | CAAUUCUCCAAAU | 1256 | GAUGAAUGUGAAU | 1876 | GATGAATGTGAAT | Intron 55 |
| | UCACAUUCAUC | | UUGGAGAAUUG | | TTGGAGAATTG | |
| 637 | AAUUCUCCAAAUU | 1257 | CGAUGAAUGUGAA | 1877 | CGATGAATGTGAA | Intron 55 |
| | CACAUUCAUCG | | UUUGGAGAAUU | | TTTGGAGAATT | |
| 638 | AUUCUCCAAAUUC | 1258 | GCGAUGAAUGUGA | 1878 | GCGATGAATGTGA | Intron 55 |
| | ACAUUCAUCGC | | AUUUGGAGAAU | | ATTTGGAGAAT | |
| 639 | UUCUCCAAAUUCA | 1259 | GCGAUGAAUGUGA | 1879 | GCGATGAATGTGA | Intron 55 |
| | CAUUCAUCGC | | AUUUGGAGAA | | ATTTGGAGAA | |
| 640 | UCUCCAAAUUCAC | 1260 | GCGAUGAAUGUGA | 1880 | GCGATGAATGTGA | Intron 55 |
| | AUUCAUCGC | | AUUUGGAGA | | ATTTGGAGA | |
| 641 | GUGAAAUUGAAGC | 1261 | ACAUCUGUGUGAG | 1881 | ACATCTGTGTGAG | Exon 56 |
| | UCACACAGAUGU | | CUUCAAUUUCAC | | CTTCAATTTCAC | |
| 642 | UAUCACAACCUGG | 1262 | CUGUUUUCAUCCA | 1882 | CTGTTTTCATCCA | Exon 56 |
| | AUGAAAACAG | | GGUUGUGAUA | | GGTTGTGATA | |
| 643 | AUCACAACCUGGA | 1263 | CUGUUUUCAUCCA | 1883 | CTGTTTTCATCCA | Exon 56 |
| | UGAAAACAG | | GGUUGUGAU | | GGTTGTGAT | |
| 644 | CCUGGAAGGUUCC | 1264 | GACUGCAUCAUCG | 1884 | GACTGCATCATCG | Exon 56 |
| | GAUGAUGCAGUC | | GAACCUUCCAGG | | GAACCTTCCAGG | |
| 645 | CUGGAAGGUUCCG | 1265 | GACUGCAUCAUCG | 1885 | GACTGCATCATCG | Exon 56 |
| | AUGAUGCAGUC | | GAACCUUCCAG | | GAACCTTCCAG | |
| 646 | UGGAAGGUUCCGA | 1266 | GACUGCAUCAUCG | 1886 | GACTGCATCATCG | Exon 56 |
| | UGAUGCAGUC | | GAACCUUCCA | | GAACCTTCCA | |
| 647 | GGAAGGUUCCGAU | 1267 | GACUGCAUCAUCG | 1887 | GACTGCATCATCG | Exon 56 |
| | GAUGCAGUC | | GAACCUUCC | | GAACCTTCC | |
| 648 | GGAGUAAAAGAGC | 1268 | AUUGUUUCAUCAG | 1888 | ATTGTTTCATCAG | Exon 55 |
| | UGAUGAAACAAU | | CUCUUUUACUCC | | CTCTTTTACTCC | |
| 649 | UGUGGAUCCAAUU | 1269 | GAAUUGUUCAAUU | 1889 | GAATTGTTCAATT | Intron 55 |
| | GAACAAUUC | | GGAUCCACA | | GGATCCACA | |
| 650 | AAGGUUCCGAUGA | 1270 | AACAGGACUGCAU | 1890 | AACAGGACTGCAT | Exon 56 |
| | UGCAGUCCUGUU | | CAUCGGAACCUU | | CATCGGAACCTT | |
| 651 | AUAAUGGGGUGGU | 1271 | CAGUUUCACCACC | 1891 | CAGTTTCACCACC | Intron 54 |
| | GAAACUG | | CCAUUAU | | CCATTAT | |
| 652 | GCACUCUUGUGGA | 1272 | UGUUCAAUUGGAU | 1892 | TGTTCAATTGGAT | Intron 55 |
| | UCCAAUUGAACA | | CCACAAGAGUGC | | CCACAAGAGTGC | |
| 653 | GGAUCCAAUUGAA | 1273 | CUGAGAAUUGUUC | 1893 | CTGAGAATTGTTC | Intron 55 |
| | CAAUUCUCAG | | AAUUGGAUCC | | AATTGGATCC | |
| 654 | GCCAGGGACAAAA | 1274 | ACUAUUUUGUUUU | 1894 | ACTATTTTGTTTT | Intron 55 |
| | CAAAAUAGU | | GUCCCUGGC | | GTCCCTGGC | |
| 655 | UUUGCAAUUCUCC | 1275 | GAAUGUGAAUUUG | 1895 | GAATGTGAATTTG | Intron 55 |
| | AAAUUCACAUUC | | GAGAAUUGCAAA | | GAGAATTGCAAA | |
| 656 | UUGCAAUUCUCCA | 1276 | UGAAUGUGAAUUU | 1896 | TGAATGTGAATTT | Intron 55 |
| | AAUUCACAUUCA | | GGAGAAUUGCAA | | GGAGAATTGCAA | |
| 657 | UGCAAUUCUCCAA | 1277 | AUGAAUGUGAAUU | 1897 | ATGAATGTGAATT | Intron 55 |
| | AUUCACAUUCAU | | UGGAGAAUUGCA | | TGGAGAATTGCA | |
| 658 | GCAAUUCUCCAAA | 1278 | GAUGAAUGUGAAU | 1898 | GATGAATGTGAAT | Intron 55 |
| | UUCACAUUCAUC | | UUGGAGAAUUGC | | TTGGAGAATTGC | |
| 659 | CAAUUCUCCAAAU | 1279 | CGAUGAAUGUGAA | 1899 | CGATGAATGTGAA | Intron 55 |
| | UCACAUUCAUCG | | UUUGGAGAAUUG | | TTTGGAGAATTG | |
| 660 | AAUUCUCCAAAUU | 1280 | GCGAUGAAUGUGA | 1900 | GCGATGAATGTGA | Intron 55 |
| | CACAUUCAUCGC | | AUUUGGAGAAUU | | ATTTGGAGAATT | |
| 661 | AUUCUCCAAAUUC | 1281 | AGCGAUGAAUGUG | 1901 | AGCGATGAATGTG | Intron 55 |
| | ACAUUCAUCGCU | | AAUUUGGAGAAU | | AATTTGGAGAAT | |
| 662 | UCUCCAAAUUCAC | 1282 | AGCGAUGAAUGUG | 1902 | AGCGATGAATGTG | Intron 55 |
| | AUUCAUCGCU | | AAUUUGGAGA | | AATTTGGAGA | |
| 663 | UCCAAAUUCACAU | 1283 | GCGAUGAAUGUGA | 1903 | GCGATGAATGTGA | Intron 55 |
| | UCAUCGC | | AUUUGGA | | ATTTGGA | |
| 664 | UUAUCACAACCUG | 1284 | CUGUUUUCAUCCA | 1904 | CTGTTTTCATCCA | Exon 56 |
| | GAUGAAAACAG | | GGUUGUGAUAA | | GGTTGTGATAA | |
| 665 | UAUCACAACCUGG | 1285 | GCUGUUUUCAUCC | 1905 | GCTGTTTTCATCC | Exon 56 |
| | AUGAAAACAGC | | AGGUUGUGAUA | | AGGTTGTGATA | |
| 666 | UGUGGAUCCAAUU | 1286 | AGAAUUGUUCAAU | 1906 | AGAATTGTTCAAT | Intron 55 |
| | GAACAAUUCU | | UGGAUCCACA | | TGGATCCACA | |
| 667 | GUGGAUCCAAUUG | 1287 | GAAUUGUUCAAUU | 1907 | GAATTGTTCAATT | Intron 55 |
| | AACAAUUC | | GGAUCCAC | | GGATCCAC | |
| 668 | UCCAAUUGAACAA | 1288 | AUGCUGAGAAUUG | 1908 | ATGCTGAGAATTG | Intron 55 |
| | UUCUCAGCAU | | UUCAAUUGGA | | TTCAATTGGA | |
| 669 | CCAGGGACAAAAC | 1289 | ACUAUUUUGUUUU | 1909 | ACTATTTTGTTTT | Intron 55 |
| | AAAAUAGU | | GUCCCUGG | | GTCCCTGG | |
| 670 | AAUAAUGGGGUGG | 1290 | CAGUUUCACCACC | 1910 | CAGTTTCACCACC | Intron 54 |
| | UGAAACUG | | CCAUUAUU | | CCATTATT | |
| 671 | UGGAUCCAAUUGA | 1291 | CUGAGAAUUGUUC | 1911 | CTGAGAATTGTTC | Intron 55 |
| | ACAAUUCUCAG | | AAUUGGAUCCA | | AATTGGATCCA | |
| 672 | AGCCAGGGACAAA | 1292 | ACUAUUUUGUUUU | 1912 | ACTATTTTGTTTT | Intron 55 |
| | ACAAAAUAGU | | GUCCCUGGCU | | GTCCCTGGCT | |
| 673 | GCCAGGGACAAAA | 1293 | AACUAUUUUGUUU | 1913 | AACTATTTTGTTT | Intron 55 |
| | CAAAAUAGUU | | UGUCCCUGGC | | TGTCCCTGGC | |
| 674 | UUCUCCAAAUUCA | 1294 | AGCGAUGAAUGUG | 1914 | AGCGATGAATGTG | Intron 55 |
| | CAUUCAUCGCU | | AAUUUGGAGAA | | AATTTGGAGAA | |
| 675 | UCUCCAAAUUCAC | 1295 | AAGCGAUGAAUGU | 1915 | AAGCGATGAATGT | Intron 55 |
| | AUUCAUCGCUU | | GAAUUUGGAGA | | GAATTTGGAGA | |
| 676 | CUCCAAAUUCACA | 1296 | GCGAUGAAUGUGA | 1916 | GCGATGAATGTGA | Intron 55 |
| | UUCAUCGC | | AUUUGGAG | | ATTTGGAG | |
| 677 | UCCAAAUUCACAU | 1297 | AGCGAUGAAUGUG | 1917 | AGCGATGAATGTG | Intron 55 |
| | UCAUCGCU | | AAUUUGGA | | AATTTGGA | |
| 678 | GUAAUUCUGCACA | 1298 | GGAAGAAGAAUAU | 1918 | GGAAGAAGAATAT | Intron 55 |
| | UAUUCUUCUUCC | | GUGCAGAAUUAC | | GTGCAGAATTAC | |
| 679 | UUUAUCACAACCU | 1299 | CUGUUUUCAUCCA | 1919 | CTGTTTTCATCCA | Exon 56 |
| | GGAUGAAAACAG | | GGUUGUGAUAAA | | GGTTGTGATAAA | |
| 680 | GUGGAUCCAAUUG | 1300 | AGAAUUGUUCAAU | 1920 | AGAATTGTTCAAT | Intron 55 |
| | AACAAUUCU | | UGGAUCCAC | | TGGATCCAC | |
| 681 | UCCAAUUGAACAA | 1301 | AAUGCUGAGAAUU | 1921 | AATGCTGAGAATT | Intron 55 |
| | UUCUCAGCAUU | | GUUCAAUUGGA | | GTTCAATTGGA | |
| 682 | CCAGGGACAAAAC | 1302 | AACUAUUUUGUUU | 1922 | AACTATTTTGTTT | Intron 55 |
| | AAAAUAGUU | | UGUCCCUGG | | TGTCCCTGG | |
| 683 | UCCAAAUUCACAU | 1303 | AAGCGAUGAAUGU | 1923 | AAGCGATGAATGT | Intron 55 |
| | UCAUCGCUU | | GAAUUUGGA | | GAATTTGGA | |
| 684 | CCAAAUUCACAUU | 1304 | CAAGCGAUGAAUG | 1924 | CAAGCGATGAATG | Intron 55 |
| | CAUCGCUUG | | UGAAUUUGG | | TGAATTTGG | |
| 685 | UGGUAAUUCUGCA | 1305 | GAAGAAUAUGUGC | 1925 | GAAGAATATGTGC | Intron 55 |
| | CAUAUUCUUC | | AGAAUUACCA | | AGAATTACCA | |
| 686 | GUGGAUCCAAUUG | 1306 | CUGAGAAUUGUUC | 1926 | CTGAGAATTGTTC | Intron 55 |
| | AACAAUUCUCAG | | AAUUGGAUCCAC | | AATTGGATCCAC | |
| 687 | UGGAUCCAAUUGA | 1307 | GCUGAGAAUUGUU | 1927 | GCTGAGAATTGTT | Intron 55 |
| | ACAAUUCUCAGC | | CAAUUGGAUCCA | | CAATTGGATCCA | |
| 688 | GGAUCCAAUUGAA | 1308 | GAGAAUUGUUCAA | 1928 | GAGAATTGTTCAA | Intron 55 |
| | CAAUUCUC | | UUGGAUCC | | TTGGATCC | |
| 689 | CAAGCCAGGGACA | 1309 | CUAUUUUGUUUUG | 1929 | CTATTTTGTTTTG | Intron 55 |
| | AAACAAAAUAG | | UCCCUGGCUUG | | TCCCTGGCTTG | |
| 690 | AAGCCAGGGACAA | 1310 | ACUAUUUUGUUUU | 1930 | ACTATTTTGTTTT | Intron 55 |
| | AACAAAAUAGU | | GUCCCUGGCUU | | GTCCCTGGCTT | |
| 691 | AGCCAGGGACAAA | 1311 | AACUAUUUUGUUU | 1931 | AACTATTTTGTTT | Intron 55 |
| | ACAAAAUAGUU | | UGUCCCUGGCU | | TGTCCCTGGCT | |
| 692 | GCCAGGGACAAAA | 1312 | CAACUAUUUUGUU | 1932 | CAACTATTTTGTT | Intron 55 |
| | CAAAAUAGUUG | | UUGUCCCUGGC | | TTGTCCCTGGC | |
| 693 | UUCUCCAAAUUCA | 1313 | AAGCGAUGAAUGU | 1933 | AAGCGATGAATGT | Intron 55 |
| | CAUUCAUCGCUU | | GAAUUUGGAGAA | | GAATTTGGAGAA | |
| 694 | UCUCCAAAUUCAC | 1314 | CAAGCGAUGAAUG | 1934 | CAAGCGATGAATG | Intron 55 |
| | AUUCAUCGCUUG | | UGAAUUUGGAGA | | TGAATTTGGAGA | |
| 695 | CUCCAAAUUCACA | 1315 | AGCGAUGAAUGUG | 1935 | AGCGATGAATGTG | Intron 55 |
| | UUCAUCGCU | | AAUUUGGAG | | AATTTGGAG | |
| 696 | GUUCCGAUGAUGC | 1316 | CAGGACUGCAUCA | 1936 | CAGGACTGCATCA | Exon 56 |
| | AGUCCUG | | UCGGAAC | | TCGGAAC | |
| 697 | UUCCGAUGAUGCA | 1317 | ACAGGACUGCAUC | 1937 | ACAGGACTGCATC | Exon 56 |
| | GUCCUGU | | AUCGGAA | | ATCGGAA | |
| 698 | UCCGAUGAUGCAG | 1318 | AACAGGACUGCAU | 1938 | AACAGGACTGCAT | Exon 56 |
| | UCCUGUU | | CAUCGGA | | CATCGGA | |
| 699 | UCCGAUGAUGCAG | 1319 | UUGUAACAGGACU | 1939 | TTGTAACAGGACT | Exon 56 |
| | UCCUGUUACAA | | GCAUCAUCGGA | | GCATCATCGGA | |
| 700 | UCCGAUGAUGCAG | 1320 | UUUGUAACAGGAC | 1940 | TTTGTAACAGGAC | Exon 56 |
| | UCCUGUUACAAA | | UGCAUCAUCGGA | | TGCATCATCGGA | |
| 701 | UCCAAUUGAACAA | 1321 | AAAUGCUGAGAAU | 1941 | AAATGCTGAGAAT | Intron 55 |
| | UUCUCAGCAUUU | | UGUUCAAUUGGA | | TGTTCAATTGGA | |
| 702 | CCAGGGACAAAAC | 1322 | CAACUAUUUUGUU | 1942 | CAACTATTTTGTT | Intron 55 |
| | AAAAUAGUUG | | UUGUCCCUGG | | TTGTCCCTGG | |
| 703 | CUCCAAAUUCACA | 1323 | AAGCGAUGAAUGU | 1943 | AAGCGATGAATGT | Intron 55 |
| | UUCAUCGCUU | | GAAUUUGGAG | | GAATTTGGAG | |
| 704 | UCCAAAUUCACAU | 1324 | CAAGCGAUGAAUG | 1944 | CAAGCGATGAATG | Intron 55 |
| | UCAUCGCUUG | | UGAAUUUGGA | | TGAATTTGGA | |
| 705 | UUGGUAAUUCUGC | 1325 | GAAGAAUAUGUGC | 1945 | GAAGAATATGTGC | Intron 55 |
| | ACAUAUUCUUC | | AGAAUUACCAA | | AGAATTACCAA | |
| 706 | UGGUAAUUCUGCA | 1326 | AGAAGAAUAUGUG | 1946 | AGAAGAATATGTG | Intron 55 |
| | CAUAUUCUUCU | | CAGAAUUACCA | | CAGAATTACCA | |
| 707 | UAAUAAUGGGGUG | 1327 | GUUUCACCACCCC | 1947 | GTTTCACCACCCC | Intron 54 |
| | GUGAAAC | | AUUAUUA | | ATTATTA | |
| 708 | UGGAUCCAAUUGA | 1328 | GAGAAUUGUUCAA | 1948 | GAGAATTGTTCAA | Intron 55 |
| | ACAAUUCUC | | UUGGAUCCA | | TTGGATCCA | |
| 709 | CAAGCCAGGGACA | 1329 | ACUAUUUUGUUUU | 1949 | ACTATTTTGTTTT | Intron 55 |
| | AAACAAAAUAGU | | GUCCCUGGCUUG | | GTCCCTGGCTTG | |
| 710 | AGCCAGGGACAAA | 1330 | CAACUAUUUUGUU | 1950 | CAACTATTTTGTT | Intron 55 |
| | ACAAAAUAGUUG | | UUGUCCCUGGCU | | TTGTCCCTGGCT | |
| 711 | UUCCGAUGAUGCA | 1331 | AACAGGACUGCAU | 1951 | AACAGGACTGCAT | Exon 56 |
| | GUCCUGUU | | CAUCGGAA | | CATCGGAA | |
| 712 | UUUGGUAAUUCUG | 1332 | GAAGAAUAUGUGC | 1952 | GAAGAATATGTGC | Intron 55 |
| | CACAUAUUCUUC | | AGAAUUACCAAA | | AGAATTACCAAA | |
| 713 | UUGGUAAUUCUGC | 1333 | AGAAGAAUAUGUG | 1953 | AGAAGAATATGTG | Intron 55 |
| | ACAUAUUCUUCU | | CAGAAUUACCAA | | CAGAATTACCAA | |
| 714 | UGGUAAUUCUGCA | 1334 | AAGAAGAAUAUGU | 1954 | AAGAAGAATATGT | Intron 55 |
| | CAUAUUCUUCUU | | GCAGAAUUACCA | | GCAGAATTACCA | |
| 715 | UGGAUCCAAUUGA | 1335 | UGAGAAUUGUUCA | 1955 | TGAGAATTGTTCA | Intron 55 |
| | ACAAUUCUCA | | AUUGGAUCCA | | ATTGGATCCA | |
| 716 | GUUCCGAUGAUGC | 1336 | AACAGGACUGCAU | 1956 | AACAGGACTGCAT | Exon 56 |
| | AGUCCUGUU | | CAUCGGAAC | | CATCGGAAC | |
| 717 | UUCCGAUGAUGCA | 1337 | UAACAGGACUGCA | 1957 | TAACAGGACTGCA | Exon 56 |
| | GUCCUGUUA | | UCAUCGGAA | | TCATCGGAA | |
| 718 | GGUAAUUCUGCAC | 1338 | GAAGAAUAUGUGC | 1958 | GAAGAATATGTGC | Intron 55 |
| | AUAUUCUUC | | AGAAUUACC | | AGAATTACC | |
| 719 | UCCGAUGAUGCAG | 1339 | UGUAACAGGACUG | 1959 | TGTAACAGGACTG | Exon 56 |
| | UCCUGUUACA | | CAUCAUCGGA | | CATCATCGGA | |
| 720 | GGUAAUUCUGCAC | 1340 | AGAAGAAUAUGUG | 1960 | AGAAGAATATGTG | Intron 55 |
| | AUAUUCUUCU | | CAGAAUUACC | | CAGAATTACC | |
| 721 | UUCCGAUGAUGCA | 1341 | UGUAACAGGACUG | 1961 | TGTAACAGGACTG | Exon 56 |
| | GUCCUGUUACA | | CAUCAUCGGAA | | CATCATCGGAA | |
| 722 | GUAAUUCUGCACA | 1342 | GAAGAAGAAUAUG | 1962 | GAAGAAGAATATG | Intron 55 |
| | UAUUCUUCUUC | | UGCAGAAUUAC | | TGCAGAATTAC | |
| 723 | AUUGAACAAUUCU | 1343 | GUACAAAUGCUGA | 1963 | GTACAAATGCTGA | Intron 55 |
| | CAGCAUUUGUAC | | GAAUUGUUCAAU | | GAATTGTTCAAT | |
| 724 | AUCACAACCUGGA | 1344 | GCUGUUUUCAUCC | 1964 | GCTGTTTTCATCC | Exon 56 |
| | UGAAAACAGC | | AGGUUGUGAU | | AGGTTGTGAT | |
| 725 | UCACAACCUGGAU | 1345 | GCUGUUUUCAUCC | 1965 | GCTGTTTTCATCC | Exon 56 |
| | GAAAACAGC | | AGGUUGUGA | | AGGTTGTGA | |
| 726 | CACAACCUGGAUG | 1346 | GCUGUUUUCAUCC | 196 | GCTGTTTTCATCC | Exon 56 |
| | AAAACAGC | | AGGUUGUG | | AGGTTGTG | |
| 727 | GAAGGUUCCGAUG | 1347 | GACUGCAUCAUCG | 1967 | GACTGCATCATCG | Exon 56 |
| | AUGCAGUC | | GAACCUUC | | GAACCTTC | |
| 728 | GAAGGUUCCGAUG | 1348 | AGGACUGCAUCAU | 1968 | AGGACTGCATCAT | Exon 56 |
| | AUGCAGUCCU | | CGGAACCUUC | | CGGAACCTTC | |
| 729 | AAGGUUCCGAUGA | 1349 | GACUGCAUCAUCG | 1969 | GACTGCATCATCG | Exon 56 |
| | UGCAGUC | | GAACCUU | | GAACCTT | |
| 730 | AAGGUUCCGAUGA | 1350 | AGGACUGCAUCAU | 1970 | AGGACTGCATCAT | Exon 56 |
| | UGCAGUCCU | | CGGAACCUU | | CGGAACCTT | |
| 731 | GGAGCUUGGGAGG | 1351 | CGUCUUGAACCCU | 1971 | CGTCTTGAACCCT | Intron 54 |
| | GUUCAAGACG | | CCCAAGCUCC | | CCCAAGCTCC | |
| 732 | CCUGAGAUCCCUG | 1352 | GGAACCUUCCAGG | 1972 | GGAACCTTCCAGG | Exon 56 |
| | GAAGGUUCC | | GAUCUCAGG | | GATCTCAGG | |
| 733 | UGGCUGUAAUAAU | 1353 | ACCACCCCAUUAU | 1973 | ACCACCCCATTAT | Intron 54 |
| | GGGGUGGU | | UACAGCCA | | TACAGCCA | |
| 734 | GGCUGUAAUAAUG | 1354 | ACCACCCCAUUAU | 1974 | ACCACCCCATTAT | Intron 54 |
| | GGGUGGU | | UACAGCC | | TACAGCC | |
| 735 | GGCUGUAAUAAUG | 1355 | CACCACCCCAUUA | 1975 | CACCACCCCATTA | Intron 54 |
| | GGGUGGUG | | UUACAGCC | | TTACAGCC | |
| 736 | UUGGCUGUAAUAA | 1356 | ACCACCCCAUUAU | 1976 | ACCACCCCATTAT | Intron 54 |
| | UGGGGUGGU | | UACAGCCAA | | TACAGCCAA | |
| 737 | UUGGCUGUAAUAA | 1357 | CACCACCCCAUUA | 1977 | CACCACCCCATTA | Intron 54 |
| | UGGGGUGGUG | | UUACAGCCAA | | TTACAGCCAA | |
| 738 | AUGGCAAGUAAGU | 1358 | AUGCCUGACUUAC | 1978 | ATGCCTGACTTAC | Exon 55/intron 55 |
| | CAGGCAU | | UUGCCAU | | TTGCCAT | junction |
| 739 | UGGCUGUAAUAAU | 1359 | UUCACCACCCCAU | 1979 | TTCACCACCCCAT | Intron 54 |
| | GGGGUGGUGAA | | UAUUACAGCCA | | TATTACAGCCA | |
| 740 | GGCUGUAAUAAUG | 1360 | UUCACCACCCCAU | 1980 | TTCACCACCCCAT | Intron 54 |
| | GGGUGGUGAA | | UAUUACAGCC | | TATTACAGCC | |
| 741 | GCUGUAAUAAUGG | 1361 | CACCACCCCAUUA | 1981 | CACCACCCCATTA | Intron 54 |
| | GGUGGUG | | UUACAGC | | TTACAGC | |
| 742 | GGAGCUUGGGAGG | 1362 | GUCUUGAACCCUC | 1982 | GTCTTGAACCCTC | Intron 54 |
| | GUUCAAGAC | | CCAAGCUCC | | CCAAGCTCC | |
| 743 | AUGGAGUUCACUA | 1363 | GUGCACCUAGUGA | 1983 | GTGCACCTAGTGA | Intron 54 |
| | GGUGCAC | | ACUCCAU | | ACTCCAT | |
| 744 | AAUGGCAAGUAAG | 1364 | AUGCCUGACUUAC | 1984 | ATGCCTGACTTAC | Exon 55/intron 55 |
| | UCAGGCAU | | UUGCCAUU | | TTGCCATT | junction |
| 745 | AUGGCAAGUAAGU | 1365 | AAUGCCUGACUUA | 1985 | AATGCCTGACTTA | Exon 55/intron 55 |
| | CAGGCAUU | | CUUGCCAU | | CTTGCCAT | junction |
| 746 | UUGGCUGUAAUAA | 1366 | UUCACCACCCCAU | 1986 | TTCACCACCCCAT | Intron 54 |
| | UGGGGUGGUGAA | | UAUUACAGCCAA | | TATTACAGCCAA | |
| 747 | UAAUGGGGUGGUG | 1367 | CCAGUUUCACCAC | 1987 | CCAGTTTCACCAC | Intron 54 |
| | AAACUGG | | CCCAUUA | | CCCATTA | |
| 748 | UGGCAAGUAAGUC | 1368 | CGGAAAUGCCUGA | 1988 | CGGAAATGCCTGA | Exon 55/intron 55 |
| | AGGCAUUUCCG | | CUUACUUGCCA | | CTTACTTGCCA | junction |
| 749 | GCUGUAAUAAUGG | 1369 | UUCACCACCCCAU | 1989 | TTCACCACCCCAT | Intron 54 |
| | GGUGGUGAA | | UAUUACAGC | | TATTACAGC | |
| 750 | AAUGGCAAGUAAG | 1370 | AAUGCCUGACUUA | 1990 | AATGCCTGACTTA | Exon 55/intron 55 |
| | UCAGGCAUU | | CUUGCCAUU | | CTTGCCATT | junction |
| 751 | AUGGCAAGUAAGU | 1371 | AAAUGCCUGACUU | 1991 | AAATGCCTGACTT | Exon 55/intron 55 |
| | CAGGCAUUU | | ACUUGCCAU | | ACTTGCCAT | junction |
| 752 | GCAAGUAAGUCAG | 1372 | AGCGGAAAUGCCU | 1992 | AGCGGAAATGCCT | Exon 55/intron 55 |
| | GCAUUUCCGCU | | GACUUACUUGC | | GACTTACTTGC | junction |
| 753 | AUAAUGGGGUGGU | 1373 | CCAGUUUCACCAC | 1993 | CCAGTTTCACCAC | Intron 54 |
| | GAAACUGG | | CCCAUUAU | | CCCATTAT | |
| 754 | AAUGGCAAGUAAG | 1374 | UGCCUGACUUACU | 1994 | TGCCTGACTTACT | Exon 55/intron 55 |
| | UCAGGCA | | UGCCAUU | | TGCCATT | junction |
| 755 | AUGGCAAGUAAGU | 1375 | CGGAAAUGCCUGA | 1995 | CGGAAATGCCTGA | Exon 55/intron 55 |
| | CAGGCAUUUCCG | | CUUACUUGCCAU | | CTTACTTGCCAT | junction |
| 756 | CGAUGAUGCAGUC | 1376 | UCUUUGUAACAGG | 1996 | TCTTTGTAACAGG | Exon 56 |
| | CUGUUACAAAGA | | ACUGCAUCAUCG | | ACTGCATCATCG | |
| 757 | AAUGGCAAGUAAG | 1377 | AAAUGCCUGACUU | 1997 | AAATGCCTGACTT | Exon 55/intron 55 |
| | UCAGGCAUUU | | ACUUGCCAUU | | ACTTGCCATT | junction |
| 758 | GCAAGUAAGUCAG | 1378 | GGAAAUGCCUGAC | 1998 | GGAAATGCCTGAC | Exon 55/intron 55 |
| | GCAUUUCC | | UUACUUGC | | TTACTTGC | junction |
| 759 | GCAAGUAAGUCAG | 1379 | AAGCGGAAAUGCC | 1999 | AAGCGGAAATGCC | Exon 55/intron 55 |
| | GCAUUUCCGCUU | | UGACUUACUUGC | | TGACTTACTTGC | junction |
| 760 | CAAGUAAGUCAGG | 1380 | AGCGGAAAUGCCU | 2000 | AGCGGAAATGCCT | Exon 55/intron 55 |
| | CAUUUCCGCU | | GACUUACUUG | | GACTTACTTG | junction |
| 761 | AAUAAUGGGGUGG | 1381 | CCAGUUUCACCAC | 2001 | CCAGTTTCACCAC | Intron 54 |
| | UGAAACUGG | | CCCAUUAUU | | CCCATTATT | |
| 762 | GGCAAGUAAGUCA | 1382 | GAAAUGCCUGACU | 2002 | GAAATGCCTGACT | Exon 55/intron 55 |
| | GGCAUUUC | | UACUUGCC | | TACTTGCC | junction |
| 763 | CCGAUGAUGCAGU | 1383 | CUUUGUAACAGGA | 2003 | CTTTGTAACAGGA | Exon 56 |
| | CCUGUUACAAAG | | CUGCAUCAUCGG | | CTGCATCATCGG | |
| 764 | GCAAGUAAGUCAG | 1384 | CGGAAAUGCCUGA | 2004 | CGGAAATGCCTGA | Exon 55/intron 55 |
| | GCAUUUCCG | | CUUACUUGC | | CTTACTTGC | junction |
| 765 | CAAGUAAGUCAGG | 1385 | GCGGAAAUGCCUG | 2005 | GCGGAAATGCCTG | Exon 55/intron 55 |
| | CAUUUCCGC | | ACUUACUUG | | ACTTACTTG | junction |
| 766 | GUUUGGUAAUUCU | 1386 | GAAUAUGUGCAGA | 2006 | GAATATGTGCAGA | Intron 55 |
| | GCACAUAUUC | | AUUACCAAAC | | ATTACCAAAC | |
| 767 | UAAUAAUGGGGUG | 1387 | CCAGUUUCACCAC | 2007 | CCAGTTTCACCAC | Intron 54 |
| | GUGAAACUGG | | CCCAUUAUUA | | CCCATTATTA | |
| 768 | UGGCAAGUAAGUC | 1388 | GAAAUGCCUGACU | 2008 | GAAATGCCTGACT | Exon 55/intron 55 |
| | AGGCAUUUC | | UACUUGCCA | | TACTTGCCA | junction |
| 769 | GGCAAGUAAGUCA | 1389 | GGAAAUGCCUGAC | 2009 | GGAAATGCCTGAC | Exon 55/intron 55 |
| | GGCAUUUCC | | UUACUUGCC | | TTACTTGCC | junction |
| 770 | CCGAUGAUGCAGU | 1390 | UAACAGGACUGCA | 2010 | TAACAGGACTGCA | Exon 56 |
| | CCUGUUA | | UCAUCGG | | TCATCGG | |
| 771 | CGAUGAUGCAGUC | 1391 | GUAACAGGACUGC | 2011 | GTAACAGGACTGC | Exon 56 |
| | CUGUUAC | | AUCAUCG | | ATCATCG | |
| 772 | CCAAAUUCACAUU | 1392 | ACAAGCGAUGAAU | 2012 | ACAAGCGATGAAT | Intron 55 |
| | CAUCGCUUGU | | GUGAAUUUGG | | GTGAATTTGG | |
| 773 | GUUUGGUAAUUCU | 1393 | AGAAUAUGUGCAG | 2013 | AGAATATGTGCAG | Intron 55 |
| | GCACAUAUUCU | | AAUUACCAAAC | | AATTACCAAAC | |
| 774 | GUAAUAAUGGGGU | 1394 | UUUCACCACCCCA | 2014 | TTTCACCACCCCA | Intron 54 |
| | GGUGAAA | | UUAUUAC | | TTATTAC | |
| 775 | GUAAUAAUGGGGU | 1395 | CAGUUUCACCACC | 2015 | CAGTTTCACCACC | Intron 54 |
| | GGUGAAACUG | | CCAUUAUUAC | | CCATTATTAC | |
| 776 | GGCAAGUAAGUCA | 1396 | CGGAAAUGCCUGA | 2016 | CGGAAATGCCTGA | Exon 55/intron 55 |
| | GGCAUUUCCG | | CUUACUUGCC | | CTTACTTGCC | junction |
| 777 | CCGAUGAUGCAGU | 1397 | UGUAACAGGACUG | 2017 | TGTAACAGGACTG | Exon 56 |
| | CCUGUUACA | | CAUCAUCGG | | CATCATCGG | |
| 778 | GUAAUAAUGGGGU | 1398 | AGUUUCACCACCC | 2018 | AGTTTCACCACCC | Intron 54 |
| | GGUGAAACU | | CAUUAUUAC | | CATTATTAC | |
| 779 | CUCCAAAUUCACA | 1399 | ACAAGCGAUGAAU | 2019 | ACAAGCGATGAAT | Intron 55 |
| | UUCAUCGCUUGU | | GUGAAUUUGGAG | | GTGAATTTGGAG | |

†Each thymine base (T) in any one of the oligonucleotides and/or target sequences provided in Table 8 may independently and optionally be replaced with a uracil base (U), and/or each U may independently and optionally be replaced with a T. Target sequences listed in Table 8 contain U's, but binding of a DMD-targeting oligonucleotide to RNA and/or DNA is contemplated.

[0248] In some embodiments, an oligonucleotide useful for targeting DMD (e.g., for exon skipping) targets a region of a DMD sequence. In some embodiments, an oligonucleotide useful for targeting DMD (e.g., for exon skipping) targets a region of a DMD RNA (e.g., the Dp427m transcript of SEQ ID NO: 130). In some embodiments, an oligonucleotide useful for targeting DMD (e.g., for exon skipping) comprises a region of complementarity to a DMD RNA (e.g., the Dp427m transcript of SEQ ID NO: 130). In some embodiments, an oligonucleotide useful for targeting DMD (e.g., for exon skipping) comprises a region of complementarity to an exon of a DMD RNA (e.g., SEQ ID NO: 2142, 2152, or 2165). In some embodiments, an oligonucleotide useful for targeting DMD (e.g., for exon skipping) comprises a region of complementarity to an intron of a DMD RNA (e.g., SEQ ID NO: 2145 or 2157). In some embodiments, an oligonucleotide useful for targeting DMD (e.g., for exon skipping) comprises a region of complementarity to a portion of a DMD sequence (e.g., a sequence provided by any one of SEQ ID NOs: 2143, 2144, 2146-2151, 2153-2156, 2158-2164, and 2166-2169). Examples of DMD sequences are provided below. Each of the DMD sequences provided below include thymine nucleotides (T's), but it should be understood that each sequence can represent a DNA sequence or an RNA sequence in which any or all of the T's would be replaced with uracil nucleotides (U's).

Homo sapiens dystrophin (DMD), transcript variant Dp427m, mRNA (NCBI
Reference Sequence: NM_004006.2)
(SEQ ID NO: 130)
TCCTGGCATCAGTTACTGTGTTGACTCACTCAGTGTTGGGATCACTCACTTTCCCCCTACAGGACTCAGATCTGGGA
GGCAATTACCTTCGGAGAAAAACGAATAGGAAAAACTGAAGTGTTACTTTTTTTAAAGCTGCTGAAGTTTGTTGGTT
TCTCATTGTTTTTAAGCCTACTGGAGCAATAAAGTTTGAAGAACTTTTACCAGGTTTTTTTTATCGCTGCCTTGATA
TACACTTTTCAAAATGCTTTGGTGGGAAGAAGTAGAGGACTGTTATGAAAGAGAAGATGTTCAAAAGAAAACATTCA
CAAAATGGGTAAATGCACAATTTTCTAAGTTTGGGAAGCAGCATATTGAGAACCTCTTCAGTGACCTACAGGATGGG
AGGCGCCTCCTAGACCTCCTCGAAGGCCTGACAGGGCAAAAACTGCCAAAAGAAAAAGGATCCACAAGAGTTCATGC
CCTGAACAATGTCAACAAGGCACTGCGGGTTTTGCAGAACAATAATGTTGATTTAGTGAATATTGGAAGTACTGACA
TCGTAGATGGAAATCATAAACTGACTCTTGGTTTGATTTGGAATATAATCCTCCACTGGCAGGTCAAAAATGTAATG
AAAAATATCATGGCTGGATTGCAACAAACCAACAGTGAAAAGATTCTCCTGAGCTGGGTCCGACAATCAACTCGTAA
TTATCCACAGGTTAATGTAATCAACTTCACCACCAGCTGGTCTGATGGCCTGGCTTTGAATGCTCTCATCCATAGTC
ATAGGCCAGACCTATTTGACTGGAATAGTGTGGTTTGCCAGCAGTCAGCCACACAACGACTGGAACATGCATTCAAC
ATCGCCAGATATCAATTAGGCATAGAGAAACTACTCGATCCTGAAGATGTTGATACCACCTATCCAGATAAGAAGTC
CATCTTAATGTACATCACATCACTCTTCCAAGTTTTGCCTCAACAAGTGAGCATTGAAGCCATCCAGGAAGTGGAAA
TGTTGCCAAGGCCACCTAAAGTGACTAAAGAAGAACATTTTCAGTTACATCATCAAATGCACTATTCTCAACAGATC
ACGGTCAGTCTAGCACAGGGATATGAGAGAACTTCTTCCCCTAAGCCTCGATTCAAGAGCTATGCCTACACACAGGC
TGCTTATGTCACCACCTCTGACCCTACACGGAGCCCATTTCCTTCACAGCATTTGGAAGCTCCTGAAGACAAGTCAT
TTGGCAGTTCATTGATGGAGAGTGAAGTAAACCTGGACCGTTATCAAACAGCTTTAGAAGAAGTATTATCGTGGCTT
CTTTCTGCTGAGGACACATTGCAAGCACAAGGAGAGATTTCTAATGATGTGGAAGTGGTGAAAGACCAGTTTCATAC
TCATGAGGGGTACATGATGGATTTGACAGCCCATCAGGGCCGGGTTGGTAATATTCTACAATTGGGAAGTAAGCTGA
TTGGAACAGGAAAATTATCAGAAGATGAAGAAACTGAAGTACAAGAGCAGATGAATCTCCTAAATTCAAGATGGGAA
TGCCTCAGGGTAGCTAGCATGGAAAAACAAAGCAATTTACATAGAGTTTTAATGGATCTCCAGAATCAGAAACTGAA
AGAGTTGAATGACTGGCTAACAAAAACAGAAGAAAGAACAAGGAAAATGGAGGAAGAGCCTCTTGGACCTGATCTTG
AAGACCTAAAACGCCAAGTACAACAACATAAGGTGCTTCAAGAAGATCTAGAACAAGAACAAGTCAGGGTCAATTCT
CTCACTCACATGGTGGTGGTAGTTGATGAATCTAGTGGAGATCACGCAACTGCTGCTTTGGAAGAACAACTTAAGGT
ATTGGGAGATCGATGGGCAAACATCTGTAGATGGACAGAAGACCGCTGGGTTCTTTTACAAGACATCCTTCTCAAAT
GGCAACGTCTTACTGAAGAACAGTGCCTTTTTAGTGCATGGCTTTCAGAAAAAGAAGATGCAGTGAACAAGATTCAC
ACAACTGGCTTTAAAGATCAAAATGAAATGTTATCAAGTCTTCAAAAACTGGCCGTTTTAAAAGCGGATCTAGAAAA
GAAAAAGCAATCCATGGGCAAACTGTATTCACTCAAACAAGATCTTCTTTCAACACTGAAGAATAAGTCAGTGACCC
AGAAGACGGAAGCATGGCTGGATAACTTTGCCCGGTGTTGGGATAATTTAGTCCAAAAACTTGAAAAGAGTACAGCA
CAGATTTCACAGGCTGTCACCACCACTCAGCCATCACTAACACAGACAACTGTAATGGAAACAGTAACTACGGTGAC
CACAAGGGAACAGATCCTGGTAAAGCATGCTCAAGAGGAACTTCCACCACCACCTCCCCAAAAGAAGAGGCAGATTA
CTGTGGATTCTGAAATTAGGAAAAGGTTGGATGTTGATATAACTGAACTTCACAGCTGGATTACTCGCTCAGAAGCT
GTGTTGCAGAGTCCTGAATTTGCAATCTTTCGGAAGGAAGGCAACTTCTCAGACTTAAAAGAAAAAGTCAATGCCAT
AGAGCGAGAAAAAGCTGAGAAGTTCAGAAAACTGCAAGATGCCAGCAGATCAGCTCAGGCCCTGGTGGAACAGATGG
TGAATGAGGGTGTTAATGCAGATAGCATCAAACAAGCCTCAGAACAACTGAACAGCCGGTGGATCGAATTCTGCCAG
TTGCTAAGTGAGAGACTTAACTGGCTGGAGTATCAGAACAACATCATCGCTTTCTATAATCAGCTACAACAATTGGA
GCAGATGACAACTACTGCTGAAAACTGGTTGAAAATCCAACCCACCACCCCATCAGAGCCAACAGCAATTAAAAGTC
AGTTAAAAATTTGTAAGGATGAAGTCAACCGGCTATCAGGTCTTCAACCTCAAATTGAACGATTAAAAATTCAAAGC
ATAGCCCTGAAAGAGAAAGGACAAGGACCCATGTTCCTGGATGCAGACTTTGTGGCCTTTACAAATCATTTTAAGCA
AGTCTTTTCTGATGTGCAGGCCAGAGAGAAAGAGCTACAGACAATTTTTGACACTTTGCCACCAATGCGCTATCAGG
AGACCATGAGTGCCATCAGGACATGGGTCCAGCAGTCAGAAACCAAACTCTCCATACCTCAACTTAGTGTCACCGAC
TATGAAATCATGGAGCAGAGACTCGGGGAATTGCAGGCTTTACAAAGTTCTCTGCAAGAGCAACAAAGTGGCCTATA
CTATCTCAGCACCACTGTGAAAGAGATGTCGAAGAAAGCGCCCTCTGAAATTAGCCGGAAATATCAATCAGAATTTG
AAGAAATTGAGGGACGCTGGAAGAAGCTCTCCTCCCAGCTGGTTGAGCATTGTCAAAAGCTAGAGGAGCAAATGAAT
AAACTCCGAAAAATTCAGAATCACATACAAACCCTGAAGAAATGGATGGCTGAAGTTGATGTTTTTCTGAAGGAGGA
ATGGCCTGCCCTTGGGGATTCAGAAATTCTAAAAAAGCAGCTGAAACAGTGCAGACTTTTAGTCAGTGATATTCAGA
CAATTCAGCCCAGTCTAAACAGTGTCAATGAAGGTGGGCAGAAGATAAAGAATGAAGCAGAGCCAGAGTTTGCTTCG
AGACTTGAGACAGAACTCAAAGAACTTAACACTCAGTGGGATCACATGTGCCAACAGGTCTATGCCAGAAAGGAGGC
CTTGAAGGGAGGTTTGGAGAAAACTGTAAGCCTCCAGAAAGATCTATCAGAGATGCACGAATGGATGACACAAGCTG
AAGAAGAGTATCTTGAGAGAGATTTTGAATATAAAACTCCAGATGAATTACAGAAAGCAGTTGAAGAGATGAAGAGA
GCTAAAGAAGAGGCCCAACAAAAAGAAGCGAAAGTGAAACTCCTTACTGAGTCTGTAAATAGTGTCATAGCTCAAGC
TCCACCTGTAGCACAAGAGGCCTTAAAAAAGGAACTTGAAACTCTAACCACCAACTACCAGTGGCTCTGCACTAGGC
TGAATGGGAAATGCAAGACTTTGGAAGAAGTTTGGGCATGTTGGCATGAGTTATTGTCATACTTGGAGAAAGCAAAC
AAGTGGCTAAATGAAGTAGAATTTAAACTTAAAACCACTGAAAACATTCCTGGCGGAGCTGAGGAAATCTCTGAGGT
GCTAGATTCACTTGAAAATTTGATGCGACATTCAGAGGATAACCCAAATCAGATTCGCATATTGGCACAGACCCTAA
CAGATGGCGGAGTCATGGATGAGCTAATCAATGAGGAACTTGAGACATTTAATTCTCGTTGGAGGGAACTACATGAA
GAGGCTGTAAGGAGGCAAAAGTTGCTTGAACAGAGCATCCAGTCTGCCCAGGAGACTGAAAAATCCTTACACTTAAT
CCAGGAGTCCCTCACATTCATTGACAAGCAGTTGGCAGCTTATATTGCAGACAAGGTGGACGCAGCTCAAATGCCTC
AGGAAGCCCAGAAAATCCAATCTGATTTGACAAGTCATGAGATCAGTTTAGAAGAAATGAAGAAACATAATCAGGGG
AAGGAGGCTGCCCAAAGAGTCCTGTCTCAGATTGATGTTGCACAGAAAAAATTACAAGATGTCTCCATGAAGTTTCG
ATTATTCCAGAAACCAGCCAATTTTGAGCAGCGTCTACAAGAAAGTAAGATGATTTTAGATGAAGTGAAGATGCACT
TGCCTGCATTGGAAACAAAGAGTGTGGAACAGGAAGTAGTACAGTCACAGCTAAATCATTGTGTGAACTTGTATAAA
AGTCTGAGTGAAGTGAAGTCTGAAGTGGAAATGGTGATAAAGACTGGACGTCAGATTGTACAGAAAAAGCAGACGGA
AAATCCCAAAGAACTTGATGAAAGAGTAACAGCTTTGAAATTGCATTATAATGAGCTGGGAGCAAAGGTAACAGAAA
GAAAGCAACAGTTGGAGAAATGCTTGAAATTGTCCCGTAAGATGCGAAAGGAAATGAATGTCTTGACAGAATGGCTG
GCAGCTACAGATATGGAATTGACAAAGAGATCAGCAGTTGAAGGAATGCCTAGTAATTTGGATTCTGAAGTTGCCTG
GGGAAAGGCTACTCAAAAAGAGATTGAGAAACAGAAGGTGCACCTGAAGAGTATCACAGAGGTAGGAGAGGCCTTGA
AAACAGTTTTGGGCAAGAAGGAGACGTTGGTGGAAGATAAACTCAGTCTTCTGAATAGTAACTGGATAGCTGTCACC
TCCCGAGCAGAAGAGTGGTTAAATCTTTTGTTGGAATACCAGAAACACATGGAAACTTTTGACCAGAATGTGGACCA
CATCACAAAGTGGATCATTCAGGCTGACACACTTTTGGATGAATCAGAGAAAAAGAAACCCCAGCAAAAAGAAGACG
TGCTTAAGCGTTTAAAGGCAGAACTGAATGACATACGCCCAAAGGTGGACTCTACACGTGACCAAGCAGCAAACTTG
ATGGCAAACCGCGGTGACCACTGCAGGAAATTAGTAGAGCCCCAAATCTCAGAGCTCAACCATCGATTTGCAGCCAT
TTCACACAGAATTAAGACTGGAAAGGCCTCCATTCCTTTGAAGGAATTGGAGCAGTTTAACTCAGATATACAAAAAT
TGCTTGAACCACTGGAGGCTGAAATTCAGCAGGGGGTGAATCTGAAAGAGGAAGACTTCAATAAAGATATGAATGAA
GACAATGAGGGTACTGTAAAAGAATTGTTGCAAAGAGGAGACAACTTACAACAAAGAATCACAGATGAGAGAAAGCG
AGAGGAAATAAAGATAAAACAGCAGCTGTTACAGACAAAACATAATGCTCTCAAGGATTTGAGGTCTCAAAGAAGAA
AAAAGGCTCTAGAAATTTCTCATCAGTGGTATCAGTACAAGAGGCAGGCTGATGATCTCCTGAAATGCTTGGATGAC
ATTGAAAAAAAATTAGCCAGCCTACCTGAGCCCAGAGATGAAAGGAAAATAAAGGAAATTGATCGGGAATTGCAGAA
GAAGAAAGAGGAGCTGAATGCAGTGCGTAGGCAAGCTGAGGGCTTGTCTGAGGATGGGGCCGCAATGGCAGTGGAGC
CAACTCAGATCCAGCTCAGCAAGCGCTGGCGGGAAATTGAGAGCAAATTTGCTCAGTTTCGAAGACTCAACTTTGCA
CAAATTCACACTGTCCGTGAAGAAACGATGATGGTGATGACTGAAGACATGCCTTTGGAAATTTCTTATGTGCCTTC
TACTTATTTGACTGAAATCACTCATGTCTCACAAGCCCTATTAGAAGTGGAACAACTTCTCAATGCTCCTGACCTCT
GTGCTAAGGACTTTGAAGATCTCTTTAAGCAAGAGGAGTCTCTGAAGAATATAAAAGATAGTCTACAACAAAGCTCA
GGTCGGATTGACATTATTCATAGCAAGAAGACAGCAGCATTGCAAAGTGCAACGCCTGTGGAAAGGGTGAAGCTACA
GGAAGCTCTCTCCCAGCTTGATTTCCAATGGGAAAAAGTTAACAAAATGTACAAGGACCGACAAGGGCGATTTGACA
GATCTGTTGAGAAATGGCGGCGTTTTCATTATGATATAAAGATATTTAATCAGTGGCTAACAGAAGCTGAACAGTTT
CTCAGAAAGACACAAATTCCTGAGAATTGGGAACATGCTAAATACAAATGGTATCTTAAGGAACTCCAGGATGGCAT
TGGGCAGCGGCAAACTGTTGTCAGAACATTGAATGCAACTGGGGAAGAAATAATTCAGCAATCCTCAAAAACAGATG
CCAGTATTCTACAGGAAAAATTGGGAAGCCTGAATCTGCGGTGGCAGGAGGTCTGCAAACAGCTGTCAGACAGAAAA
AAGAGGCTAGAAGAACAAAAGAATATCTTGTCAGAATTTCAAAGAGATTTAAATGAATTTGTTTTATGGTTGGAGGA
AGCAGATAACATTGCTAGTATCCCACTTGAACCTGGAAAAGAGCAGCAACTAAAAGAAAAGCTTGAGCAAGTCAAGT
TACTGGTGGAAGAGTTGCCCCTGCGCCAGGGAATTCTCAAACAATTAAATGAAACTGGAGGACCCGTGCTTGTAAGT
GCTCCCATAAGCCCAGAAGAGCAAGATAAACTTGAAAATAAGCTCAAGCAGACAAATCTCCAGTGGATAAAGGTTTC
CAGAGCTTTACCTGAGAAACAAGGAGAAATTGAAGCTCAAATAAAAGACCTTGGGCAGCTTGAAAAAAAGCTTGAAG
ACCTTGAAGAGCAGTTAAATCATCTGCTGCTGTGGTTATCTCCTATTAGGAATCAGTTGGAAATTTATAACCAACCA
AACCAAGAAGGACCATTTGACGTTCAGGAAACTGAAATAGCAGTTCAAGCTAAACAACCGGATGTGGAAGAGATTTT
GTCTAAAGGGCAGCATTTGTACAAGGAAAAACCAGCCACTCAGCCAGTGAAGAGGAAGTTAGAAGATCTGAGCTCTG
AGTGGAAGGCGGTAAACCGTTTACTTCAAGAGCTGAGGGCAAAGCAGCCTGACCTAGCTCCTGGACTGACCACTATT
GGAGCCTCTCCTACTCAGACTGTTACTCTGGTGACACAACCTGTGGTTACTAAGGAAACTGCCATCTCCAAACTAGA
AATGCCATCTTCCTTGATGTTGGAGGTACCTGCTCTGGCAGATTTCAACCGGGCTTGGACAGAACTTACCGACTGGC
TTTCTCTGCTTGATCAAGTTATAAAATCACAGAGGGTGATGGTGGGTGACCTTGAGGATATCAACGAGATGATCATC
AAGCAGAAGGCAACAATGCAGGATTTGGAACAGAGGCGTCCCCAGTTGGAAGAACTCATTACCGCTGCCCAAAATTT
GAAAAACAAGACCAGCAATCAAGAGGCTAGAACAATCATTACGGATCGAATTGAAAGAATTCAGAATCAGTGGGATG
AAGTACAAGAACACCTTCAGAACCGGAGGCAACAGTTGAATGAAATGTTAAAGGATTCAACACAATGGCTGGAAGCT
AAGGAAGAAGCTGAGCAGGTCTTAGGACAGGCCAGAGCCAAGCTTGAGTCATGGAAGGAGGGTCCCTATACAGTAGA
TGCAATCCAAAAGAAAATCACAGAAACCAAGCAGTTGGCCAAAGACCTCCGCCAGTGGCAGACAAATGTAGATGTGG
CAAATGACTTGGCCCTGAAACTTCTCCGGGATTATTCTGCAGATGATACCAGAAAAGTCCACATGATAACAGAGAAT
ATCAATGCCTCTTGGAGAAGCATTCATAAAAGGGTGAGTGAGCGAGAGGCTGCTTTGGAAGAAACTCATAGATTACT
GCAACAGTTCCCCCTGGACCTGGAAAAGTTTCTTGCCTGGCTTACAGAAGCTGAAACAACTGCCAATGTCCTACAGG
ATGCTACCCGTAAGGAAAGGCTCCTAGAAGACTCCAAGGGAGTAAAAGAGCTGATGAAACAATGGCAAGACCTCCAA
GGTGAAATTGAAGCTCACACAGATGTTTATCACAACCTGGATGAAAACAGCCAAAAAATCCTGAGATCCCTGGAAGG
TTCCGATGATGCAGTCCTGTTACAAAGACGTTTGGATAACATGAACTTCAAGTGGAGTGAACTTCGGAAAAAGTCTC
TCAACATTAGGTCCCATTTGGAAGCCAGTTCTGACCAGTGGAAGCGTCTGCACCTTTCTCTGCAGGAACTTCTGGTG
TGGCTACAGCTGAAAGATGATGAATTAAGCCGGCAGGCACCTATTGGAGGCGACTTTCCAGCAGTTCAGAAGCAGAA
CGATGTACATAGGGCCTTCAAGAGGGAATTGAAAACTAAAGAACCTGTAATCATGAGTACTCTTGAGACTGTACGAA
TATTTCTGACAGAGCAGCCTTTGGAAGGACTAGAGAAACTCTACCAGGAGCCCAGAGAGCTGCCTCCTGAGGAGAGA
GCCCAGAATGTCACTCGGCTTCTACGAAAGCAGGCTGAGGAGGTCAATACTGAGTGGGAAAAATTGAACCTGCACTC
CGCTGACTGGCAGAGAAAAATAGATGAGACCCTTGAAAGACTCCAGGAACTTCAAGAGGCCACGGATGAGCTGGACC
TCAAGCTGCGCCAAGCTGAGGTGATCAAGGGATCCTGGCAGCCCGTGGGCGATCTCCTCATTGACTCTCTCCAAGAT
CACCTCGAGAAAGTCAAGGCACTTCGAGGAGAAATTGCGCCTCTGAAAGAGAACGTGAGCCACGTCAATGACCTTGC
TCGCCAGCTTACCACTTTGGGCATTCAGCTCTCACCGTATAACCTCAGCACTCTGGAAGACCTGAACACCAGATGGA
AGCTTCTGCAGGTGGCCGTCGAGGACCGAGTCAGGCAGCTGCATGAAGCCCACAGGGACTTTGGTCCAGCATCTCAG
CACTTTCTTTCCACGTCTGTCCAGGGTCCCTGGGAGAGAGCCATCTCGCCAAACAAAGTGCCCTACTATATCAACCA
CGAGACTCAAACAACTTGCTGGGACCATCCCAAAATGACAGAGCTCTACCAGTCTTTAGCTGACCTGAATAATGTCA
GATTCTCAGCTTATAGGACTGCCATGAAACTCCGAAGACTGCAGAAGGCCCTTTGCTTGGATCTCTTGAGCCTGTCA
GCTGCATGTGATGCCTTGGACCAGCACAACCTCAAGCAAAATGACCAGCCCATGGATATCCTGCAGATTATTAATTG
TTTGACCACTATTTATGACCGCCTGGAGCAAGAGCACAACAATTTGGTCAACGTCCCTCTCTGCGTGGATATGTGTC
TGAACTGGCTGCTGAATGTTTATGATACGGGACGAACAGGGAGGATCCGTGTCCTGTCTTTTAAAACTGGCATCATT
TCCCTGTGTAAAGCACATTTGGAAGACAAGTACAGATACCTTTTCAAGCAAGTGGCAAGTTCAACAGGATTTTGTGA
CCAGCGCAGGCTGGGCCTCCTTCTGCATGATTCTATCCAAATTCCAAGACAGTTGGGTGAAGTTGCATCCTTTGGGG
GCAGTAACATTGAGCCAAGTGTCCGGAGCTGCTTCCAATTTGCTAATAATAAGCCAGAGATCGAAGCGGCCCTCTTC
CTAGACTGGATGAGACTGGAACCCCAGTCCATGGTGTGGCTGCCCGTCCTGCACAGAGTGGCTGCTGCAGAAACTGC
CAAGCATCAGGCCAAATGTAACATCTGCAAAGAGTGTCCAATCATTGGATTCAGGTACAGGAGTCTAAAGCACTTTA
ATTATGACATCTGCCAAAGCTGCTTTTTTTCTGGTCGAGTTGCAAAAGGCCATAAAATGCACTATCCCATGGTGGAA
TATTGCACTCCGACTACATCAGGAGAAGATGTTCGAGACTTTGCCAAGGTACTAAAAAACAAATTTCGAACCAAAAG
GTATTTTGCGAAGCATCCCCGAATGGGCTACCTGCCAGTGCAGACTGTCTTAGAGGGGGACAACATGGAAACTCCCG
TTACTCTGATCAACTTCTGGCCAGTAGATTCTGCGCCTGCCTCGTCCCCTCAGCTTTCACACGATGATACTCATTCA
CGCATTGAACATTATGCTAGCAGGCTAGCAGAAATGGAAAACAGCAATGGATCTTATCTAAATGATAGCATCTCTCC
TAATGAGAGCATAGATGATGAACATTTGTTAATCCAGCATTACTGCCAAAGTTTGAACCAGGACTCCCCCCTGAGCC
AGCCTCGTAGTCCTGCCCAGATCTTGATTTCCTTAGAGAGTGAGGAAAGAGGGGAGCTAGAGAGAATCCTAGCAGAT
CTTGAGGAAGAAAACAGGAATCTGCAAGCAGAATATGACCGTCTAAAGCAGCAGCACGAACATAAAGGCCTGTCCCC
ACTGCCGTCCCCTCCTGAAATGATGCCCACCTCTCCCCAGAGTCCCCGGGATGCTGAGCTCATTGCTGAGGCCAAGC
TACTGCGTCAACACAAAGGCCGCCTGGAAGCCAGGATGCAAATCCTGGAAGACCACAATAAACAGCTGGAGTCACAG
TTACACAGGCTAAGGCAGCTGCTGGAGCAACCCCAGGCAGAGGCCAAAGTGAATGGCACAACGGTGTCCTCTCCTTC
TACCTCTCTACAGAGGTCCGACAGCAGTCAGCCTATGCTGCTCCGAGTGGTTGGCAGTCAAACTTCGGACTCCATGG
GTGAGGAAGATCTTCTCAGTCCTCCCCAGGACACAAGCACAGGGTTAGAGGAGGTGATGGAGCAACTCAACAACTCC
TTCCCTAGTTCAAGAGGAAGAAATACCCCTGGAAAGCCAATGAGAGAGGACACAATGTAGGAAGTCTTTTCCACATG
GCAGATGATTTGGGCAGAGCGATGGAGTCCTTAGTATCAGTCATGACAGATGAAGAAGGAGCAGAATAAATGTTTTA
CAACTCCTGATTCCCGCATGGTTTTTATAATATTCATACAACAAAGAGGATTAGACAGTAAGAGTTTACAAGAAATA
AATCTATATTTTTGTGAAGGGTAGTGGTATTATACTGTAGATTTCAGTAGTTTCTAAGTCTGTTATTGTTTTGTTAA
CAATGGCAGGTTTTACACGTCTATGCAATTGTACAAAAAAGTTATAAGAAAACTACATGTAAAATCTTGATAGCTAA
ATAACTTGCCATTTCTTTATATGGAACGCATTTTGGGTTGTTTAAAAATTTATAACAGTTATAAAGAAAGATTGTAA
ACTAAAGTGTGCTTTATAAAAAAAAGTTGTTTATAAAAACCCCTAAAAACAAAACAAACACACACACACACACATAC
ACACACACACACAAAACTTTGAGGCAGCGCATTGTTTTGCATCCTTTTGGCGTGATATCCATATGAAATTCATGGCT
TTTTCTTTTTTTGCATATTAAAGATAAGACTTCCTCTACCACCACACCAAATGACTACTACACACTGCTCATTTGAG
AACTGTCAGCTGAGTGGGGCAGGCTTGAGTTTTCATTTCATATATCTATATGTCTATAAGTATATAAATACTATAGT
TATATAGATAAAGAGATACGAATTTCTATAGACTGACTTTTTCCATTTTTTAAATGTTCATGTCACATCCTAATAGA
AAGAAATTACTTCTAGTCAGTCATCCAGGCTTACCTGCTTGGTCTAGAATGGATTTTTCCCGGAGCCGGAAGCCAGG
AGGAAACTACACCACACTAAAACATTGTCTACAGCTCCAGATGTTTCTCATTTTAAACAACTTTCCACTGACAACGA
AAGTAAAGTAAAGTATTGGATTTTTTTAAAGGGAACATGTGAATGAATACACAGGACTTATTATATCAGAGTGAGTA
ATCGGTTGGTTGGTTGATTGATTGATTGATTGATACATTCAGCTTCCTGCTGCTAGCAATGCCACGATTTAGATTTA
ATGATGCTTCAGTGGAAATCAATCAGAAGGTATTCTGACCTTGTGAACATCAGAAGGTATTTTTTAACTCCCAAGCA
GTAGCAGGACGATGATAGGGCTGGAGGGCTATGGATTCCCAGCCCATCCCTGTGAAGGAGTAGGCCACTCTTTAAGT
GAAGGATTGGATGATTGTTCATAATACATAAAGTTCTCTGTAATTACAACTAAATTATTATGCCCTCTTCTCACAGT
CAAAAGGAACTGGGTGGTTTGGTTTTTGTTGCTTTTTTAGATTTATTGTCCCATGTGGGATGAGTTTTTAAATGCCA
CAAGACATAATTTAAAATAAATAAACTTTGGGAAAAGGTGTAAAACAGTAGCCCCATCACATTTGTGATACTGACAG
GTATCAACCCAGAAGCCCATGAACTGTGTTTCCATCCTTTGCATTTCTCTGCGAGTAGTTCCACACAGGTTTGTAAG
TAAGTAAGAAAGAAGGCAAATTGATTCAAATGTTACAAAAAAACCCTTCTTGGTGGATTAGACAGGTTAAATATATA
AACAAACAAACAAAAATTGCTCAAAAAAGAGGAGAAAAGCTCAAGAGGAAAAGCTAAGGACTGGTAGGAAAAAGCTT
TACTCTTTCATGCCATTTTATTTCTTTTTGATTTTTAAATCATTCATTCAATAGATACCACCGTGTGACCTATAATT
TTGCAAATCTGTTACCTCTGACATCAAGTGTAATTAGCTTTTGGAGAGTGGGCTGACATCAAGTGTAATTAGCTTTT
GGAGAGTGGGTTTTGTCCATTATTAATAATTAATTAATTAACATCAAACACGGCTTCTCATGCTATTTCTACCTCAC
TTTGGTTTTGGGGTGTTCCTGATAATTGTGCACACCTGAGTTCACAGCTTCACCACTTGTCCATTGCGTTATTTTCT
TTTTCCTTTATAATTCTTTCTTTTTCCTTCATAATTTTCAAAAGAAAACCCAAAGCTCTAAGGTAACAAATTACCAA
ATTACATGAAGATTTGGTTTTTGTCTTGCATTTTTTTCCTTTATGTGACGCTGGACCTTTTCTTTACCCAAGGATTT
TTAAAACTCAGATTTAAAACAAGGGGTTACTTTACATCCTACTAAGAAGTTTAAGTAAGTAAGTTTCATTCTAAAAT
CAGAGGTAAATAGAGTGCATAAATAATTTTGTTTTAATCTTTTTGTTTTTCTTTTAGACACATTAGCTCTGGAGTGA
GTCTGTCATAATATTTGAACAAAAATTGAGAGCTTTATTGCTGCATTTTAAGCATAATTAATTTGGACATTATTTCG
TGTTGTGTTCTTTATAACCACCAAGTATTAAACTGTAAATCATAATGTAACTGAAGCATAAACATCACATGGCATGT
TTTGTCATTGTTTTCAGGTACTGAGTTCTTACTTGAGTATCATAATATATTGTGTTTTAACACCAACACTGTAACAT
TTACGAATTATTTTTTTAAACTTCAGTTTTACTGCATTTTCACAACATATCAGACTTCACCAAATATATGCCTTACT
ATTGTATTATAGTACTGCTTTACTGTGTATCTCAATAAAGCACGCAGTTATGTTAC

[0249] Homo sapiens dystrophin (DMD), transcript variant Dp427m, exon 54 (nucleotide positions 8117-8271 of NCBI Reference Sequence: NM_004006.2; nucleotide positions 1686466-1686620 of NCBI Reference Sequence: NG_012232.1)

(SEQ ID NO: 2142)
CAGTTGGCCAAAGACCTCCGCCAGTGGCAGACAAATGTAGATGTGGCAA
ATGACTTGGCCCTGAAACTTCTCCGGGATTATTCTGCAGATGATACCAG
AAAAGTCCACATGATAACAGAGAATATCAATGCCTCTTGGAGAAGCATT
CATAAAAG

[0250] Homo sapiens dystrophin (DMD), exon 54 target sequence 1 (nucleotide positions 1686541-1686602 of NCBI Reference Sequence: NG_012232.1)

(SEQ ID NO: 2143)
GATTATTCTGCAGATGATACCAGAAAAGTCCACATGATAACAGAGAATA
TCAATGCCTCTTG

[0251] Homo sapiens dystrophin (DMD) exon 54/intron 54 junction (nucleotide positions 1686591 to 1686650 of NCBI Reference Sequence: NG_012232.1)

(SEQ ID NO: 2144)
CAATGCCTCTTGGAGAAGCATTCATAAAAGGTATGAATTACATTATTTC
TAAAACTACTG

[0252] Homo sapiens dystrophin (DMD), intron 54 (nucleotide positions 1686621-1716747 of NCBI Reference Sequence: NG_012232.1)

(SEQ ID NO: 2145)
GTATGAATTACATTATTTCTAAAACTACTGTTGGCTGTAATAATGGGGTGGTGAAACTGGATGGACCATGAGGATTT
GTTTTTCCAATCCAGCTAAACTGGAGCTTGGGAGGGTTCAAGACGATAAATACCAACTAAACTCACGGACTTGGCTC
AGACTTCTATTTTAAAAACGAGGAACATAAGATCTCATTTGCCCGCTGTCACAAAAGTAGTGACATAACCAAGAGAT
TAAACAAAAAGCAAAATACTGATTTATAGCTAGAAGAGCCATTTATCAGTCTACTTTGATAACTCTATCCAAAGGAA
TATCTTTCTATCTCATCATGGCGCACACTGCCTTACCTGTTATCTGATAAATAAGTCACTTTGGGATTCATGATAGA
GTTATAGCTGTACATGGTCTCATCCTAGTATCTCACTCCACACACCCAATGGGAAAATTTGTGGAGGGCAATATGAC
TCGTCACTTCATTTCCCATTATATATGAATGGAAATTAACAGCGCTTATAGACAGTATCTCCTCAAACTAAGCCTTG
TATCCTTATTATACCTCTCTTGATCTCTAGTGCTTTTTTCACTAGCATTTATTCCAATCATAAATAAAAATATAAAT
TATGTAACTAATTGTTAAATATTTGTCCTTTAAATTAATCTAAATGCCATGAGGGCAGAGATTTTGTCTTTCTCATT
TGATACATCCCCAGGTCCTGAACCACGTGATATAATAGGGAGCTAGTAAATGTTTTTTGAATGATGACTCCCTTTGC
AGAATGTACAATTACCTTGTGCAAGCTGAAAAAATAGCACCTGTACAATATGAGGAAGACCACGGTGAAAAATAATT
GAGTTCCAAAATATGACATCAATTACTGAAAAAATAAGCTCGGTGATTTTTAACAAGAAGTAAAAGTCACCACTGGG
GCCAAAACAGATTTTGAACTAAGAGTAGGAAGTCTTAGGAGAAATGAGATAATGATATATGGAAATTAAGCGGCCAA
CTAAATTTTGAAACTGAGCTAGACATTAGAGAGTAAAAACTCCTGTGAAGCTGAATTTAAGCTGGTCACCCTGGGGA
ATAGAGCAACTCTAATCCTGAATTCCAGACAGTAGGTGTATAGATGGAAAAGACCATGGAAAAGAAGATTCAACCTA
AAGTTGGGAAGTTTTAATTGGAGCCCTATGAAAAAGACCCTGGTGGAGAAAGGGCAAACTTGAATATGGAGCTGATA
TTTGGAAAAATTCTCATAGTAACTACTTTTTCTCAATGGCAAGGCTTGGACTTTCTTCTCAAAATACAGATCTTATA
TGTGTTCAATTAAACAGGGACAGATTAGGTTCAGGAAGAATTATTCACATGGAATCAATTGGTATCAGAGAGTCAAC
CATTAGATCTTAGTGGGAAATATCTGCTTCTCAAAGAGAAGTCTTTTGGGGAAAGCAAATTAAAGTCAGAGATTAAT
TTGATGAGTTTAGGTAATATAAACTAAGGGGCCAAGAAAAAAGCTTGCTCATGGTATGAAACTAGAGCTTGAGGACA
CTGATCTAGTCTATCTATACTACTCTTTCTGACAGACCCCTCTCTTCATTCTCATGCTCCTTGATGGCCCAAGCCAC
TCTCTCAGTTTTTTAAAAAATTGTTTTATCAAGGTCTCTGGATTCTTCATGGGAATGACTTCCAGTTTATATTTTTT
GGCTTGGTTCCAAAAAGCTATCAGCTAAGGAATGCATATACTTACTTCCCCTATGGGTAAAGTAAATGAGAATTTTA
GAAGCCAACTCACATTTTTAGCCTGTACAGAATCTGCAATTCACCAAGCTACTTCTGACTCATGTCTATAAAGTTCT
TCCCTGTTCTTTTCTCACTTCACATGTACTCTTTGCAAGAATTCATCCACTTGTGTAGTTTCAGTCTGTTGATGACT
ACCCATCTATAATTCCAGCTGAGAATGATCTTTTGAGTTTTAGACATGTAGATCCTGCTGCTTTCTTTCGATGTTAA
TGTCCCACAGGAACTTCACATTGAAGAGGTCCAAAGCTAAACTCATCTTTGCCTTCTTCCAATCTCTTTCTCCAAAT
GCAACCTACTTCTGTTGTCCTTGTCTTAGTCCTTTTCGTGCTTCCGTAACAAAATACCACAGACTGGGTAATTTATA
ATGAACAGGGATTTGTTGGCTCATAGTTCTGGAGGCTGCGAAGTCCAAGATCAAGGGGCTGGAATCTGGTAAGGGCC
TTCTTGTTGTGTCATGATTCCATGATGGAAGGTGGAAGACCAAAAGAGAGAAAAAATGGGGCCAAACTTGTCCTTAT
ATGAAACTCACTCCCACAATAATGATGCTAATCCGTTCATGAAGGCAGAGCCTTCATGTCCTAATCACCTCTTCAAG
GTCACATTTACTACTGTTGCAATGGCAATTAAATTTTACCATAAGTTTGGGAAGGGAAAAACATTAAACCATAGCAT
TCTGCCCCCTTTTCCCCAAAATTCTTGTTCTTCTCAAAGACAAAATACATTCATTTCATCCCCAAAGCCCCAAAAAT
CTTATTTCAGCATAAACTCAAAAGTGCAATCTAATATAAATTAGATATGGGTGAGACTCAAGGCACAATTCATCGTG
AGGCAAATTCCCTTCCATCTCTGAGCCTGCAAAATCGAATCAAGTTCATCCCCTCACCCCCTACCCTTCCCAGCATC
AGGTAACCACCAATCACAGAAAGTTTTACTGATAGTCCTGCTCTAGATCATCTTTGTCTATGTTCACTTTAGCTATT
TATCCTAGTGTTCCATTATTGGAATACTAAGCATGTGGGAATTATTTATATTCTACTGTTCAAGGTCCTCACCAAGG
TCTGATTGCAAAAATTCAAAAAATTGCAACCTTAGGCATAAATGGGTTAAGCAGTTTAGGGTACATTTATAATAATT
ATTTACTGTGCTACTTCAAAAATCTTATTGCCTCTATTTATAAATAAAAAGTGTTGTCTCTACACAGTGGCTTGTTG
TAATGCATTTACTTGTTTCTGCCTGATTTTTTCTATTTATACATTTTCTTTTTTATTTTTATTTTTATTTTTTCACT
TTTAAGTTCAGGGGTACATGTGCAGGTTTGTTACATAGGTAAACTTGTGTCATGGGGGTCTGTTGTACAGATTATTT
CATCACCTAGGTATTAATCCTGGTACCCGTTAGTTGACTTTCCTGATCCTCTCGCTCCTCCCACCCTCCACACTCTA
ATAGTCCCTAGCATGTGTTGTTCCCCTCTACGTGTCCATGTGTTCTCATCATTTAGCTCCCACTTATAAATGAGAAC
ATGGGGTATTTGGTTTTTTGTTCCTGTATTAGTTTGATAAGGACAATGGCCTCCAGATCCATCTATGTCCCTGCAAA
GGACATGATCTCATTCTTTTTTTATGGCTACGTAGTATTCCATGGTATTTGTGTTGGTCTCAAAAACTACAACTATG
ACAGGATGGCATTTTCACTTTTGTTGTTATATTAAACTCATCTTAAAAAGGAAAGATTAATAATGTCAATATTTGGG
TTATGGAGAAAAAGTATCTCATATCTTTGAAAAAGTTCTGTAACTATAGCTTTTTAGGTAGGAGGGATTCTGTGGAA
AGTTTTCTGATTACATCATTTCTCACAGTTCAGGTTAGACACCATTTTACTATGAAACACTAATGCATTGCCTGCAC
TGAGACTTTCAGTCACATGGAGAAACCTAGGCAAAATTTTTGTACACTTGGAAGAATATTTAAATTAGTAATAAAAT
CTTTAGTTTTAAACTGTTGAATGTTAAATAAGATATAAAATGTACTTGAAAGAAATTTGCTTTGATATCAGACACTG
CCATGTTGCAGTTTCAAGACATAATAAAAAAGTAAACTAATGTTTATATTTTGCTGTTTAAGTTTATTAATACATCA
GATGAGTCTTCAAATTCTACAGTGGCTTTTGATATGATCATTTTTACTTGCCATTTTATATAGAATAAATATAAATA
GGCATTTATGCTTAAAAGGAACTAATCTATCTATGGAAAAAAGAGAAGGCTGCTTCTCAACTAAATTGTACAGTTTA
GAAACCCAGATCTGAACATAGATTATTGTTGTGACCTATGTAGGAAAATATGTTGTTTTCCTTATCGTAGTCCTTAC
AGAGTCCATGATAACATATAAAGCCAGAAATGTGAGCCTCTGCAAGTTCATTTCTTTGTCTTCAATCTCTGTGAATA
GATATGAGTTTGTGAATAAGATAATATTAGATGTGATATTACAAATTATTGTGAGAAGCCTCTAAGGATTAGATTTC
AAGGACTGCCATCTGGCTGATGACTTTATGATGACACTGTCATGAGATTTCATTTCCTTATTTCTGTTCCAGGATCA
CTCTTTAAACAAGAAATAAGCATTAACTCTGAATTGTCTGCTTGTAGCTGTATGAGGGCTTCCACAACTGCCAACTA
GCCAGGTACAAACTCATCAAGCAGAGGAGATGGTCCTTGCATCAGAGGGTTAAACATGCCTAGAAGTTCCTTAGCTA
AGCTCCCAGATACTAAAAAATCCCTCTAGGTTCTAAGAAAGATTCAGCATGTACATGTGTGTACATGTATGTGTGTA
CATATATACATATACGTGTATATGCATATGCATGCATATACATACAAACACATTTTCTTCCATAACATCTCAGTATT
CTCTGTTCTTTATAATACTGTTTTGTATTTTAATGATCAAAATTAATAGITGATCATCTGAAAACATTTTGACCTGT
TTTCTCCGTCTTTGACAACCTTGAAGGCACTTGTAAGTCACTCTTTGCTTCTCTATTCCTAGGTCCTTTCTCATCTT
CATTGCAACAAGAAAAGAGAAAACAATTGAGCCCTATTTTGTGTGTAGCAAGGAGCTACTCTAGTTAAACACTAGAT
CTCTTTTACATTCTCCAACATGTTGTTTTAGTAATTATTCTACTTTCCTTTTTTTGGGATATTCAATTTCTTCTTTC
TTTTTGCTCCTCCCCTTTAGCAGGCCAACATACTCAAGTCTCCCTCATCCTAAGAGAACTTTTTTAGTATATCATTT
TTTTTCTATCCAGCTGTACTTGCTTCTGCTTACTATATCATTTTTAAGCAGTAGTTGGCATTACTGTTTCCTGTTCT
TTAGCTACTAGTTGTACTTTGACCCACTCCAGTCTCACTTCCCCAGCACCACCACTTTATGAAAACAAGGACTTACT
AAGATCATCAGTGACTTTGTAATAGCTAATTAGTGTATTTTAATTCGTCCATCTTCTTGACTATATTTTAACATTGA
TCCTGTTGGTCAACTCTGCTAATCAAAACTTTATCCTCCTTGGTTCCCAGAACAATATTATCTTGAATATCTCATTT
CTCTAATCATATAATAATTGTGAGGTGCTTGGCACAATGCCTAGTGCGTAGTAAGAACTCAGTAAAATATCATCTGC
CATCGACACCATAAAAATTAATTTACTTACTCAACAAATACTTTTGTATGAAGTTTGTGCTAGGTAGGCCCAGTAAT
TGGTACTTGGTATAGAGCAATGAAAAGCCCTACCCTCATAAAGCTTATATTCTTGGAAGCAGAAGTTGGAAGACAGA
CATTGACAAATAAAAATTAAATACATGATGTGTCAGATGGTCATACACACAGTGTGGAAGAACAAAGAGGAAAACAA
GTGGAGAGAGAGAGGGAGGTGGAAGAGGAGTGCTGCCATGAAAATGTGGTAATCAAAAAAGGTCTTACTGAAAAGGT
GGCATTTAAGCAAATTCTAAAAGACCTGAGGATGTGGGCCATATGTATAATTGGGGGGGAAAAAGTAGTCCAGGAGA
GTCCTAATAAGTTAAAATGCCCCAAAGCAGGAATATTCTTGGCATGTTGAAGGAACCTTAAAAGGGAGATCAGTTAG
GCAGAAAAGGATCAAGCGAGCAGGAAGGTAGTTGACAATAAATTTAGAGGGGTAACTGGCATCTGATTATATTGGCC
TTTTAGGCCTGTGGACTTTAGCTTTTAATCTGAATGAGATGGGAGTTATTGGAGGGTTTTGAATGGAGGAGTGACAT
GTTTTGTCTTATCTGGCTCCTCTGTTACAATAGACTAAACAGAAGTAGTGAGACCATTAGGAAACTGTTGTCATAAT
TCAGTCAAGAGATGACTGTGGCTGGGATCAGAATGGGAGAGGTGAATGTGGTGAGGAGTGGTTGGATTCTACTATAT
TTTGGGTACAGAGCACAACAGATTTTATAATGGAATAAATTTAGGTGTGAGAGAAAGAGTCAAGAAGACTCAAGAAT
TTTTAGCCTGAGCAACGGAAAGATGGGGTCATCATTTACTGAGATGGGGAAGGCTCCAGGAGTAACATATTTTGGGA
GGAAGATGTGGATATGTTACATTTGAAATGCCTATTATACATCTAGGAGATGTGTGGAGTAGATAGCTGGATATATG
AATCTTAAGTTATGGGGAGTAGCTCAAGATACAAAGTTGGGAGTTGTAACAATGATCAGTGCAAGTTCTCTGTCTTC
AATGCAATTTTAAATGTTGATGTTCCATTCTTAATTGTCTCTCTTCTTTCTCTCTGCACATTTTGAGTAGCTTTGTC
TGTTGGCTTCAGTTAACATTAAGACTCCTCAGTGTCAACTTCCATCTTACACTCTTCTCCTGATCTCCAGAACTGTA
CTTTCTGCCACCTAACCTACATTACCACCTGGATATGCTACAGGCTGCAAAATGTGTCAAGTAGAATGCATTATCTT
GCCCCTAAAAGAAAGTTAAATTTTCTGTGTTTTCAGTGTAGTGTAATTGTCTAACTTAATTGTCTCTAAAACTGGAA
ACCTAAGAATTACCTTCTACCTTTCTCTTGATCTCTCTTTCCCAATCTACTGACACATGTATTAAACTGGCTTCCAA
ATTCTGTGAATTCTACTTCAAAAATTGCTCTAGAAACAATTCCCTCTCTTTATCCCTATTGTCACCTCATCCTAAAG
CCTCTTCATCCTTTGTAGATTTCTGGGAGATTGTAACCAACTTTTCTCTATTCTGCCAGTTATCAAGTCTTTACGCT
CATTTGACATTCACAACAGCCTTGGATCTGTCTTCCTTGAAATGAATCTTCTTGCTTCCCTTTGATTCCAGTGCTTT
TTTTTTACCCTCCTGAGACTTGATGCATGATATTTACATGTATGACATGTTTCCAAAAGCATTCTCAAATTTTTCTG
AAAGTAAAAACAAATGAAAAAGTAAAACATTTTCCTGGGAAGAAAAGCAAATAGTGTTATACATTTTTGCTTGTTCA
TTTGTTTGTTTATTTAGGAGAGGGACAAGCATTAGAACTTCATAAGAGTCTTATATGCTGTATCTACAAATACCGTC
CCTTGGCAATATAATTTTAGAGTTCCTTTTCTGGAACTACTTAAGGACTGTTTTATGATCCTCAGCAGACTGTTATA
TTATTTTATAGCCATACCTTTTATTTGCTGAGTAATTGTACTCAATAATTGTTTGTAATTGAATGAAACAATTCATC
AGATGTTGGGCACTGAATGGCTTTGGATTATTTCCAAAAATTTAAAGGATAAAGATTTGCTGCCTTCAAAGCTATGT
ACAAAAATATGATAGAATGCTAGCGGGATATTTGTTTAAAATACAACCTTTATTACATTGGGGCCTGCTCATAATAT
ATATGTGGCACATTTTATTTAAAATATTAAAGTTCCTGGTGGGACATGTCCCCATAATCCCAGCACTTTGGGAGGCC
GAGGTGGGGGTGGGAGGATCACTAGAGGCCAAGAGTTTGAGACCAGCCTGGGCAACATAGTGAGATACCATTTCTAC
AAAACATAAAAAAAAAAAAAAAAAAGCCAAGTTTGTAGTCCCAGCTACTTGGGAAGCTGAGGCAAGAGGATTTCTTG
AACCTAGGAGTTCAGTTCAAGGCTGCAGTGAGCTATGATCATGCCAGTGTACTCCAGCCTGGGTGACGTAGTGAGAC
TCCATCTCTTAAAATTAAATTAAATTTAAAGCTACAAATGACCCCAAAGCCACCAGTTCAACCCTCTCAATTTTGAA
TACCCTATTTTAAATTCCTCTTATGCGAAATGTACCTTGTAGTCCATTTTAAGGACTGAGAGGATTTGGTATGTTAA
AAAATTCAATCCATTATCAACTCCTTTAGGTACACTTAGCAGTATGAAAATGTGTCTTTCGGCTCTTCAGGAGAGAG
TCATATGTATAGTTACAAGACAATCCCATTTTTATATTGCTGAGACCCAAATCTTCCCAACTGATTATGAAGCATAA
GAACTCTTCGGAGGTTTAAGTGAGCTGAGATTGTGCCACTGCACTACAGCCTGGGCGACAGAGCAAGACTTTGTCTC
AAAAAAAAAAAAAAATTCTCTGCATTCTACAGTAGGGTAATATAACATCTATGATGTGAAATCTTGGGGCTCCGGGC
CAGAGAGTGTCATGATCCATATGGATCTAAAAGGTTCATAGTGGTAACAGCCTGCTTCATTTTATGTCATCTCCTTT
CAAGTAATTAGAATGTTTCTAGCTTGCAGGGATTGCACACAAAGGGAGACATTTGGAACCATGTCATTGGTGATTTA
CTGGTGTGGAAAATTACCTGGTGATGTAGCCAAGTAGCCATTTTCATTCTAACCCAGTCCTACAGTCCTGAACTGGG
CTGAACCAACGCACCAAAATATATGCTTAGAAATGCTCCTATGTATCAGTTTTCCCAGGAAAAACAATAGTATTATC
GAAAACTTACCATTGTTTCCTAATAAAAAATTATAGGATACCAACAGACTGTTTTTTGTTCATAAATTTAATATTAC
AGTATCAAATATTAAAGCAAATGGGAGAAAGTTTTTCTTATTTGGTTTAATTGAACCATTAATGTTAGCTACAATAC
CCATCATGTTACTTTTCAATTATATTTATATTTTCATTTTATTTCTATCTGTATCATTCTCAGAAAGACTTCTTTAA
AACATTCAATAAAAATAGAATTTAGGTAGATTTATTTTTAGAAAGTTGAGTTTTTTTAATAAATGAATATAATCATC
ACTTGACTTAATTTTTTTCTGCACAATTCTAGAAATCTTATAGTTTTGGGATCCTTTGGCTTTATTCAGTATGTAAC
AGGGATCTGTTTCCTTTCTCTAAATCATTAATTCAAATGATTTCTTATATTAAAAATGTTTGGACATATAGGTATTA
ATGAGTTTTATGAAATCTAATCTTTCCAATTTCCCCCTAAAAAGGGATGTCATTTAATCAGTTCTAGGTTGTGATCA
ATAGCAGATTTTTTTTTTTTTTTTTTTTTTTTTTTTTTTTTTTTTTTTTTTTTTTGCAGCTCCCTTTCACCCCGTAG
GGAAACCTGATATCATCCTTGACTAATTGCAGCAAAGAGCCTGGCTCAGGTCCTTTGTCTTATACCGAGTGTTTATA
GATTCTTGAGCCCAGCAGAATCTGAACTCCTGGCTACTGCTACCTACTTCCCAGCCCAGGCCCCAAAAGCCCTATGT
CTGCAGCCCCGTGCACCACTGTGTGTTTTTGTGGCATTTCTGAAACACAGAGCTACTTAACTTGTTTCTAAGCCCAG
ATTGTGCCTTTTTGATTTTCTATTTTGGTATTTTATCTACCATTTTTCTGTGTTTGGATGTTTCTTCTATATTTTGA
AATAACTTCTTTCCTTTAGTACAAGTGATTCTTATTGTAGAAACTATCAAAAATTTACAAATAAAGAATCATTCTCA
ACATTCTTAGCAATTCCTTCTATCATATTTTTGCAAATATATTTTTGCCTATTTTTATTTTACTTACTCCCTGTTTA
TTAACAGTTAAAAGCATTTTCAGATAGTTTTATTTTTTCATTTAAAAAAATCTTACCACATTTTTATTAGGAAGGAA
ATGGACAGGTGTTTATCTTTTCAATAAAAAACATGGGGGAAATAATTTCTTGAAGTACATAGTGACATTCTTCCAGC
CAATGTTTTATGCTGTGGTCATTCCGTCTGTCATCAGTATTCATAGAAAGAGATGAAAATTATTTAAATTAACTAGG
AAATCAATTCCCCATTCAAAGCAGTAGTTGTGTGTTTCAAATATCTTCTAATAGTCAGTTTCACACTTAGCTTTATC
AAATTCCTAATTATGATACTCATTACATCACTCTGTGTCCAGTCAGTGTGTTTATGCCACAGAGCAATTAAAGCAAA
TCAGGTGAACCAAATTCAATCACCTTTGTAGATAATAACCTACGTTGCTTAAACTTATGGCCGCTCATACAATTACT
GATGGATTGCCTTTTTCTTTTATATTGCCAGTATTTTAAATGTCCTAGTGAAGTTGGGGTAGCTGTTGAACTTCAAC
TTTATCACAACCTCTTTTTTAAAATGTGTAAACGAAAAAACCCTCCATGAAATGACCAAATACAGTTTTCATGCTGG
GACAAATTAGATGAATAATAATCATAAATTCATAATGATTATTTATGATTTTATGTTTTTATAGTGAGATATGTTTT
GTTGAAATGTGTTATATAAGTGATACTTAAGTTTCCTATTAAAATAGAAATGCTAAAATGGCATTGTTCTCTTTAGC
TGTGAGTCTAGCTTTTGACCTCTGCTTAAACGGAACTGTTGTTCCATCCCAAATCTGCAACTCTGAGGCCTATGCTC
CCTTCACTGCTGTCTAATGGATACCTATCAATTTGGAAGGAGGTTTCAGGCAGCTATTCCCGGTAATCTAATCTCAG
CTCTGTCCTTTTCAATATTTTCATCAGTGGCTTGGATGAAGACATAGATAACATTCTTATCAAATCAATGCCACAAA
GCAGGGAGAAATAGCAAATATAGCAGACAAGAGTATCAGGAGCCAAAAAGTTTTCAACAAGTTGGACTGGTAGGCTG
AATACTGAAAGATGTAATGTAAATGCAAGGTGCTACATGTGGGTTCAAAAGAAACATGAAACAAAAAACCCATCTAA
CTTAGACTGGGCTCCCTGGAAATAGACTAAGATAGAGAGTTGTGTGCATAAGGTTTGTTGAGGAGTGTTCCCATGAG
ATACATGTGTAAGGTTGTAAGATAGGCAAGATTGCACAGACGAAGAAGTGCAGTGAAGCCTGCAGTGCGTTGCGGCC
TCATCAGATTTTCAGGGGAGTTCTGGAAATTGCATGGCCCTTTAGAGACACGCTGAATTGAAGCAAGGGATCTGGAC
CTTTGAACCCAATACTAGAGAGTTAATGGTCCTGGGTCACCCCATGGGAAAGAGCAGACTGGAGTAAGATTGTTACC
TACAGCTGAAGGCAATTTCCAGGGAGGGAGGCAGCTGTGAGCTGTTAGTAGTCAATATTCCAACCAGCTAGGGCATG
AGGTCTTGGCAGAGCAACAGTGTACCCAAGACCGCAGTGTTACCCAAAGTATGGTCCTCTGACTGGCAGCATTGGTA
TCACCTATGAGCTCACTAGAAATTTAAATTTGTAGGTCCTACCCCATCCAACTAAATCAGAATCTCIGGGGATGGGA
CTTGGGGAACTITTAACAAGCTTTCAGGCCTCCAAGTTATTTCTATGCATATTAAAATTTGAGAACCACTGCCTACA
CCAACCAAAAACATTCCAAATATGGAGATAACATAGAGTTTTTAGCAACAATAATCTCCTTCTGTTTCACTTCTCTC
TTTACACACACACACACACACACACACACACAACACACAACACACAATGTGATAGAACAGTGGGAAAGGAAAGCCAA
AGGGGATCTTAGGCCGAATAAATTTAAGCATATAACCTAGTCCTAAGAACGTATATTTCAGCTTAATAGAGAGAGGA
ATATTGTTATAAAGCTGTCCAAAGATGGAACAGGCTGCCTTGTAAAGTTGTAGAAGTATTCAGGAACAGGTTGGTGA
TACCTTGGTGGTTGTATGGTATAACATCCTGATCTTCACATACTCATCATCTAGAGTGGGAGTTTTCTTTTTCCAAA
TGGGGTTTTGGCAGAACTAGTTCCACTGTATCTTAATAAGTAATAACTCAAGAAAGGGTTCTATGGATGAAAAAATG
ATTAGGTAATATCAAGTTAAATCAAAGCGAACAGACTTCTTTCCCATAGGAGTAATCAGACCCTTATTACAGTGCAT
GCTTGGTGAATCAACAAAGTATGTGTATTTATGAAAGTATGGGGGGAAGGGATAATCTATACAGTATGCATCCCTTC
TAAAAGTTTGACCATGAAAACAATTTCTCAAGAATCTTATACAACACTACAGTATCTGGTCCAATACTATGCATAGA
ACATGCACTCAGTAAGTGTTTGTAAGATAGATAGCATAGCATATAGGCCAGGCCACTGAAGGGAAATCATCTCACCG
TGAGTTACCTGAATAGTATTCTCTAGTGCCATTAGCTCAATTCTTCACGTAGGCATAAGCCTATACATTTGCCATGC
TAACCAAGGGAATTTGTGTTACGTGAATTTTGACTCTATTCAGACATTTTTTTCTATGACTCCTCCAAGGCTGTTAT
TCTTACCTCATATTCTGGTAGAAGTTTAAGGACTTTTTTCTGGGAATATTGATTAATTAGCTAGCTAGCTAGAGACA
GAGAGAGGATAGAGATTGATTCTCTGGCAGAGCCTATTTGAATCATATTGAATCTTTTTTTTTCCTGAGACTTCCCA
CAAGGAGGATGGAGGAGAAATTTTTTAGAAATCCACCGAAGTAATCAGGGATATCTTCAGTAAAAGAAGCTATACTT
AATAAAGTCTCTATTTTAGCAGATGGCAATCAACAATAGAGGCAATAGACAATAGAGTCTATTAAAATTGCTGGGAT
CTGCTAATAACGTTTTTCTTTTCCCTGAAACAAATGCCATTAACCCTCCTTGACACTCTGTCTTCATCAACATTCTA
ATAGAATGGAAGTAACTCATAATTTTGAGGATTTTTTTCCCACACAAAACCTATAAACCACACCACGCTAGTGATTA
CTTTTAGCCTAGTTGCTAGGTTGCTGCTGGTAACAGTAAAACTTATCCTGACAGGTAGGCAATTCCAGAAGCCCAGC
CAAGCACTTGGTGTGTGTGAGTAAACCCCCATACACTTCTCATGTAGAGTAACCCTGGCCAACCCATAACTCTTAGC
AACTATTCCTGGTGGACGGACCTGGTCTACTCTAAGAAGAGGCCAAGGTTCTTTAATAGTGCAGTTGCAAGAACCAG
AATTGAAAGTCAAAGTTCTAGCAAGATTTTGCAGACTCCTTGGCAAACCAGTGGCTTGGGACTCATTCTTGACTTCA
AGCCCTTAATTGATAATGGTAGGACAGCTTGCTTGCGCTGGGTTCTGCTCCCTGGGATATGCACTGTTTGCCAAATG
AGTAGCAGGTGGACAGACATCTTTACAATTTGCTGTCCCATATTCTAAATGAACGTGACATTCTATAGGTCTGAGTT
AACCTATGAAGTCACCAATTTCAATATCAAAATATTTATGACAGAGAAAAGGATACTGAGGCACAGAGAGTCTGTGA
CTTTCCTAAGCTCAAAACACCAGTTTGTGTTAATTCTGACACAGAAATTCTTGTATTTGCTATCAGTCTCCTTTTTC
TGTGTGTGTGTGTGTTTTTACATTGCAGCATCACCTATATGATGTTAGGTTCTGTAACTTTTTGAGAATTTTCTCAC
ATACAGTGATGTGTTACTTTTTGATATTTCAAATAGTTCTAGTAAGTCTTTTCTACTTTTATTAGCGTATTAACATA
CTGGCTCTAAGAGGGCATCTCACCACATCTTTGCCATTCTTCCTGGAAAGGCAAGTTTCTCTCCATCTTCTTTTTTG
TATTCCAAAGTTTTGCCAAAGTTTGCTTTTGAAAATGGGTTACCTGGCAGAGCTTTATTATTCTAACTTTGAAAGTA
CAAGTCAGAATCAGACAGTGGCAGTTATATATGCACTACTGTGATTACTATATAATGAAAGTATCTATGGTGAAAAT
ACTGATACTGACATATATTTGCCATTTTCTAATTAAGTGCTTCAGTAAAAATTAAGCACTCACTCTTTGCCAGATAC
TGCAATAGATATTGAGCACATTGAACAAAATTCTCCATATACATATATATGAGTCCACATTCTATGAAAGTATAATG
TTTTTCTGAGAAAAGGCATAATATTCTATTAATATCAGCTTTTGCTTCTTCCACCATATATTGAAAGAATTCTGAAT
ACTGTTATAATTTAATGGGAGAATCTAGAGAATTCTGTATTTGCTTTCACTGCATTGATGAACTAAGATTTTTAAAA
AATGTATTCTTCATAGAACTACTTTTCCATATTTACCTAATATTATTCTTATATCATTTGAGCACATATTTCACTAA
CAAAACAAATGTGCAATGTTATTAGTTCTAACATCAAAATTACACTGATACTTTAATTTTTATCCTATTATTTTTCA
TGCAGATTAAAATAATTATAGCTACATCACATGTTGCAAGTTTTAAGAGCTACTTTAAAAATATATGCTTCAGGAAA
GACATGATTAGATGGGGAAATGGATGATGTTCATATTTTCAAATGAAAAGTTTTAAAAAAGTGCCTATCACAAACAC
TAAATTTTTACATAAATTATCAACTACTAATATATCTACAAGAAATACCATTTTTCCCTACAAAAACTCTTAACAAT
AATTGTTAAACTTAGTCCTGGAACCTGCTAATATAATCGGACAAATGTTGTCAATAAGAAGGTGAAAAAGAAAGCAT
ATATAGTTTATCAAACTATAAAATATAGTTTATCAAAACCAATTTTTCCTATTGACATTTATTCAGGAAGGAAAATG
GATGAGTGAAATGAACAATGGTCTCTAAGAGAGGTGGGAGATAGCAATAAATTCAGACCACGTTTCCTGTCATTACA
GCAGGGAAGTAAAAGAGCTACAGTCAACTCTCGAAAGTACTTGGGGGAACTAATGATTCCCTGTAGACCTGTGATGT
TTTTGAAATTTAATTCAACAATTTGATATACACCGCAAAGCGAACAGATAGTCAGATCAAAATCGGAAGAACGATTG
TCTGAATGGCATCCATTTTTCCTAGATGTGCTGTCCCATCCTGTGTCAATTAAACTTTCAGGTGATCTTCAAACATA
TTTCCAAGTAAAAGGTATTGCAGTTATCCTATAAACTGGCCTCTTCCCCAGCACTGCTTTTGCTGTGGTCAACTTTA
TTTCTTTGGGCTCACAAAACTGATAGAGCAAAATAAGGAAAACGGAACATTGGATTAAAATAAATTAATTCCCATTC
TGTGACTCACTAAAAAAAAAATGATAACTATGCTTCTGTGAGCATTAATAAGGAAATGAATAAGGAAATGACCAAAT
TGTTCAGTGGACAACTTGTATGGGATTTTTAAGTATTGTGTCATCATCAATGTTGTCAATTAGCATATACTTTGAAA
TCAACTAAAGCAAATCAGTTGACTAATCATTAAGGGTCTTTTTAAATGACAACATCTAAACAGCAAATGTTTTATTT
TGGAAAATCATGACAGCACAAGAATGAGCCAGATGTTTTACAACATGATATCCATAATTTAAAGTATGTAGTAGTCA
CTCAAAGGATTTCTATTTCAGTTTCCTTATGATTTGGCTAAGCTAGAATTTGGAAAAACACTTTAAGGTAATGTGAG
AAACAGCAAAATTCAACATGTGGATTTTTTCACTAAAGCTTATTTCTGATTATTTTTTACAAACTTTACTAGGTATA
TGTTAACTTCATGACACTTATAGCAGTGGACCGTAGTTTTAATAAAATGTGAATGTATACTCTTTTCTCAATAATAT
TAAAGAATGTTGACTTTCGTGAGGATATTTTTATTTTTCTCAACATTAAGAACTGTCAAAGATTTAATTCTACAACA
GAAGACGTGAATTTTGTTTTCTAAAGGAGAACAGAATCTATAGAAGAAGTGTTGCTCATAGTACTCAGATTGTTGAC
CAATCTTAAAGGAGAAACCGTCAATTAATTTACCGAGAAGTAATAACATTATCTTTTTCTTCAATTATGCACATCCA
CAAAGATTTGGGGCAAAATCCACTTAAATGATATTATACATAATAGATGAGTATTCATATGTTGTAAGAGTCCTGGC
TTCTTTCCTGCAAAATGATTAAAACTTGGATCAGAAACCAATTAAAAATCCATTCTAATTCCCAAATGTATGTAACT
GTACTATAAGAAAAATAAATATTTCTTCTTGAGGGATATCCATTAGTTAAGGATATTCATAACATGGTGTCTTGTAG
GAAATGTTAATCTTTGGGTGAATAGGGATGTTTGGGAATAACAAGACTCAAAGAGATGTTGCACTTACTCACTTTTC
TCTGAGTTGTTATTTCTGTCATTTCCCCAGTGCGCCTGTCCTCAACTTTGCCTCTCTCCTTATTCCTTTTTTTTTTT
TTTTTTTTTTGAGACGGAGTCTCGCTCTCTTGCCCAGGCTGTAGTGCAGTGGTGCGATCTTGGCTCACTGCAACCTC
TCCCTCCTGGGTTCAAGCAATTCTCTGTCTCAGCCTCCCGAGTGGCTGGGATTACAGGCACCCACCACCACGCCCTG
CTAATTTTTTTTGTATTTTTAGTAGAGACAGGGTTTCACCATCTTGGCCAGGCTGGTCTTGAACTCCTGACCTCGTG
ATCCACCCACCTTGGCCTCCCAAAGTGCTGGGATTACAGGCGTGAGCCACCATGGCCGATCCCTCCTTATTTCTTTT
TATCTCTACCTCTGCCTCAATGGTATTTCTCTATTACTGTTAGCATTTGCTTTCTGTGAGCTCTTGCACACTGTCAG
CTTATATACATGTTCCTGTTCACATGTTTTCCTGTCCCCAGTGGTTACAACATGTCTTCTATCTCAGCCCACTCTAG
AATTGTCTTACTTTTCCAGGTCTCCTGCTCCTCAGTATTTTTCCCACTTTTCTAGATTCATGTTTTCCCATCTGCAT
ATTTCTCTTCCATGTCTGCACTGTCATCCGCTTAGAAGACAGCGCATAAGGACACTGTTATCTGAGCAAATCTTCAG
CACAGCCACCATGAAGCATGGTTACCTTGTCACTTTCCATTTTTCCCATAGTGTGTGCAAACTGCCCTGATCTGCAT
AGAAAGGTATCATAATTGAGGAAACAAAATGCACAAAAATGTCCTTGGTTATTCCACCCCTCAGAAATATAGGAGAG
AAGTAATTTACAGAATTACACAGAATAACGCTATGTCACATGGACATGGAGTTATCGGGTTAGCATATAATTGGAAA
ATATTTCCTAGGACCTTGACATTTACTCACTTTTTGTTTTCAAATTACATGTCCCTATCTATTAGTTGCAAATTATT
TTAATGCACCGTTTACCAAAGAAAGGCTGTTTCTTCTGAAAGCTTTCATTTGACAAGTAACTTGTAAAAATATTCAC
ATTGTGTATCTGTTTTCCCCTTCTAGTCCAAACTCTAGTTATCTTAAACTTTGCGCAGTTATAAAAAATCATAACAA
AAAAAGCTTCCTCGTTGTCATTCTTGTCAAAACAGGTTTACCAGACTTAGGTAAACTTAAAATAGTTAGTGTAAAAG
TTAAAAAGCTGATTTGCTCCTTCCAGCGTGTTTGTTGCCTTTTTGCCACAGCAAAATTGTAAATGTAAACGTATTCC
CTAGGAGATGAGCTGGGCTGCAATTTTCAGCTAATTGGGAGAAGCAGCCCTGAGTTGAGCACTGTCAGGCTGATTTG
AGTCTTAAGATATGATGATGATTATTGTGTCAAATGTAATCAAGAACGTGGGCTCTGAACTGACTCAAGGGCTGGCT
GTTTTTAATTCAGGTTCGTATATGAAGTAGACCTCCGGTTCACCGATAGTCACAGCTGGTTGTAGAAGAGAGCAATT
TTTAAAATGCTATTTCATTCTCTATGGAGCTCTAGGGATCAGAGATTGGATGCACAGGGAGGGGACACATCCTCATT
CTCTCCTGAAAAATTCTATTAATTTTCAGTATAATAAACTTTCTCTTGAGATTCCCCAGTGGCTCTGTATCGGTGGT
TTTCAAACTTCTCAGACCCAATGCCACCCCTCTTTTCTTTTTTAAATAACAAATACTTTGTAATACCTTCTTTACGA
TTATAAGCCAAAATATGTAGACAACATACCCTACTTATACAGGCAATAGTTTAAATGATGCCGTAACTCTATTTTAA
AGAGAAATAAGAGTCATTTATAATAAAATAATATGTGTTGTAGTATGCAGTTATTCAGGCAGGATCACACTGGAACA
CAAGTGAAGTTTTTAGATCACGAGACTATCAATGCAGTATAAACAAATGCAGAATGACACCATTGTGTTGTATGGAG
ACTCAAATACCATGAGGGGCATTGGTCATCCATAGCGTAATTTTCCAAAATGCTGAACAACTCTTGGCAAAATTCCT
AACACCATGAAATAAATTTTTTCTTGGATCGTTATGGCAGTTAGTTGCATGGCTGAAAAATTCAATGTCTTAAAATC
ATGAGGAAAATATCTTATGTTTACGTGTAAAATTGAGTTACGTTCCAGGTTTAGGTGTTTATAAACAGGGTTTCCAC
ATACATGCATGTCCAGTGGGATATTCCAAAGTGCTGTCAGACTTGGGAGAGTTCTTTGTTGTATAAGAAGTCTACCA
TCTTCATTCCCTCTCCACAGAATGCTATTATAGTAACACTCTTCAATCACTGTGATAGTCAAATGTCCTCCCTCAAT
TTCTAGGATGCCTCTTTTTTTTGTGGTCTGTATAATTTGGTTAAATATCTTTCCAGACAAATACTGATTTGTGAATT
AATGAAATAGCAGTATTTTCGGAGCACCTAACCTATTTCTGAGTGATACAGTTGCCATTTTTACAAGACTAAATGAA
ATTACCATTTCAGACCTGCCAGATTGTCTAGCCCAGTCTTTTACAATTCTGTGATTATCACTGCAATTATAATCTAT
TTTCACCACTTGAATGGCATGATCTCTATAAAAGGGTGGTGATAACACTCATCTATTCTCCTTCCCCTCACATAGCT
ATATCAATCGCCCCCTAACCAGTTGTTGATAAATGCAGITGAATTTTATGTAAAAATTATAAGAGATATTATTGTAG
CTGTCCAAGACATTTAAAATGCTAAATGCAACTTACGTGGAGGCTATAAGAGAAATATGAACCCATTTATTGAAGAG
ATTAGCTAATTTAGTAAAACAACACAGATATACCTGCATACAGGGATAAATCCCTATTGTCTAAATTATTGAGATAA
AATAATGTTTTACAATGAAAAACTTTTAGACAAGTAGGTAAGTAAAATGCAGCAGTCTATTTGCATTTCATCTGGGC
ATTTGACAAAGTCTTTCGTTATACTCTTGTGAATAAGTTGGAGAAATACTGGCTAGATGCAAGATAAATTGGATGGC
TTAGAAGCCACTTCATGATTTTACGCAAAGGATGTCGATTAATAGACCAGTGTCAGGTGGTGATGGAAGATCTCTGG
TGCTATGTCACAAGCTTCTGTTCTCAACCCTGACACACTGGATGTTTTTGACAGAACATGAGTAGAACTACAGAGAG
GAGGCCCATCAAACTTATGGGTGATAAAAAGCAGGGAGGGCAGGAGTATTTTGGGTGACAGAAGCCAAATGGGTGTC
TGGACAGGATGCGTTTTAAGGCACTTTTGGTACTTGATGTCTGAAGACCAGGATCAAACTTATAGGCAATCTGAACA
TTTGCCAAAATAACAGGTTAATTTTGACAGAAGTTATTATTTGTATGCTGTCTATTTCTTTAATACACCTAGAAAGT
ATTGAAATAACATTTTTTGCAGACACTCATTTTGAAAATTCAGAAAAAAAATTGTTAACTTTCGTGGAAGAGTAACA
GAAACTCAGTCATTGACAGCTAAATACAATGTGTTGCCCAGTAAAATAGTCCACCCCTTCACTTTCATGGCTAATAT
AAAATTTGATGAAAGATACAAATTCCAAAGATTGAATATCTGTACATTTGCAAAGCAAAACACAATTTTGGGCACAG
AATTGCTCATTCTCATTTTTAAACATCTTGGTTATAACTGAACAATAGTTTTTTATAACAAAGATAATATTTTCAAA
TTATTATGAGGTTCAACTGAAATAATTTATGTGAAAGCAATGTCTAAACTCTAAAATTCTATATAAATATAAATTAT
TATTCAATAAATTCACATCAAGAAAATTTTAAGTTTTTTAAGAACAAGAGCCTATGGCCTTGTTTTTAGAAGCTGTA
TACCTTATCGGTAGTAGGTTTATTGACTTTAATTAAATTTATTGAGTATCTATTAAATTGCCAGGAACTGTGGTGTG
AATCTTTGCCCTCAAATAATTTACAGTAAGTIGTGGTTGATGAATGGTGATGACGATGATGAATATCCAGACTATAG
TAAGTGGTATATTCATAAGTCAGAGGATTCTTAAAACCAGATGCACCCTCAGATTCATTCCTTTCATGTTGTACTTC
TAATTGAAAAAAATAAATCCTAAATTATGACTGTTCTTTATAAATTTTAATTGATCTTATAAAAGGCCATCAATACA
TTTCAAAGTATCTAGGTCTTTTAAATGCAATTTTTCACCCTGGTAATTAAAAGTACGAAAGCAAGAAACTTTAAATC
TTTATTTTGATAAGTTTTAATTAGCTCAAGCTACTTGTAATCCCACATCTTGTCTTGTAAATCATATCTGAGCCATT
AAAATAGGTTTACAATTAGAAGGGCAATTCTTTTAGAATCTACTTAAACTAAGTCACTTCGACAAATTAATTCATCG
TTCAGTTGGTTTTATTAAAATGTATTTATTTCACTGTAAAATGTCTAGTAAAGCAATGTATGAAGTATTTTATTTTC
ATGTTAGAAATTTTATGTAAAAGATATCCCAAAATACATAGACATTCAGATACTCTCTGTATCATTAACCAACATTT
ACTAACTTATCATTTAGAGAAGGCCAAAATTGTATGTACTATAACTTTGTATAATTTCATAAGAATTAAAATATTCG
ATTAATGCCTGTAATGCCTTCTTTCTAAATCAAATCCTCAAGCTTACCTCGAGTTCAAAGTTCAGTATTTATTGTAA
CACATCTCATAGATGACGGATGAAGATGGTAAGCAAAGGAATAATAATTTCTTTTCTCTTTTCACACATATATACAC
ACATACCCCATAATCCTAATTCATATAATAATAACAGAAAACAAAGGGCTTTTGAGAATAGTGACATATTAATATCC
ATTATATTTACTTCACAGGGAGACTGGCAAGTCTACCTTGAGAGGTAATGTCTTATAGTACAGTGGACTAGATTGTT
TCAAGATTTGTCATTTATTTTGGCAACTCACCCAGCTTCCCTGAAAGTTAAGTTCCTCATCTATAAACTGTTCATGA
TAATTACAACCTGCCTCATTAGCCTCATCAAGCTATTTAAAATATGAAAGGAGGTGCTATCTGTGGATCCTGTCAAA
GGAGCTTGAAAACTGCAGAACATTATTTTAGTGTAAAATACTATAACAATACATGTTGAATATAAAATGGCTTTTTC
TTAACTTTTATTTTAAGTTCAGGAGCACGTGTGCAGGTTTGTTATATAGGTAAACTCATGTCATGGGGGTTTGTTGT
ACCGATTATTTTGTTACCCAGGTATTAAGCGTAGTACACATTAGATATTTTTCTTGATCCTCTCCCTCCTCCCACCC
TCCCCACTCCAGTAGGCTTCCACGTCTGTTGTTCCTCTCTGTGTCCATGTGTTCTCATCATTTAGCTCCCACTAATA
AGTGAGAACATGCAGTATTTGGTTTTCTGTTCCTGCATTAGTTTGCTAAGGACAATGGCCTGCAGCTCCATCCATGA
TCTCTGAAGAATCTCCACACTGGTTTTCACAATGACTGAAATAACATACACTATAACCAACAGTTTATAAGCAATGC
TTTTTCTCCAGAACCTGTTATTTTTGACTATTTAGTGATAGCCATTCTGACTGGTATGTGATGGTATCTCCTTGTGG
TTTTGATTTGCATTTCTCCAATGATCAGTGATGTTGAGCTTTTTTTCATATGCTTGTTGGTCGCATGTATGTTTTCT
TTTAAAAAGTGTCTGTTCATGTGCTTTGCTAAAAGGGCCCTTTCAAATGTGTATTATTAACCACAAGAGAGTACTGA
GTAAGAGACTAGGTAATAAAAGTCACAAATATTTCGATATCATAATTCAGAATTTAGATCAGCGGTTATGAAATTGT
TCGTATTTCCAAATTCCACTGACAGGACTCTACTATAAGTTTATTTCATCTGTTGATATGTTTTTAGCCACTTCTTT
CTTTTAAAGTGAATCTGTTGTGTGTTTGCCATTTGATATTAGAAAACTGAACCTGCCTGCTTTGCTGTCTTCTGAAT
ATTATGTATCAACAACTAACAAGCTACAGTTAGTTGTTTTGTTCTGTTTTTCTCTAAGTTATTGTGGATGAGGATAT
ATATAACTGCACAGTCTTATCAGGTTTGTAAGAGATGATCTTAGGCTCATCTTTTAAATTGGTTTTTATACTATTTT
AAACAAATCCTTTTAGGAGAGAAGAAAAGCTGCTTAGTCTATCAACATTAGGAAATATATCTTTAAAGAGTTTATCA
CTGCAAGTAACCAAAGCCAACTTAAAAATTCGCATTATACAAATCATTGAGAATTTATTTAGAACAGAAATGTGTCC
AACTATAGGTCAACACCAATTTTAAGTGTGTAATTATCTGGGAAGTAGTGTTAACTGCATTTTTTTCTAAAGATCCC
TTACAGTTGTATAAATGCCCAAAAGGATATTTTGAGTCTCTGTATATTAACCAAACCAAATGTAATTCATTACTCCC
AACATTATATTTCAACCTCTCCAAATAGTACCTTTTCGTATTGTATCAGCAGAAAAATATAAAATGCAGATCTTAAA
GAGTATCAATCTCTTTAAAAATTCAAGAAAGAAAAAAATATGTGTGTATAGAGACGTGTATTTCATCTGCTCATAAC
ACTGTGTACATTTCTTTATCAACTAATTTTTTTCAGTGATTTATGAGTTGAAATACAAATCAAATGAAACGGGTAAT
GCAAAGTAAAGTAGAAAACACATTTTCTACTGCTGTCTCCTAATGCAGGTCTTTTCAGGAAAGTACTAATGGTTTTA
GGGAAAGTGTATAATTATGGTTGTTTCCCTAATGATAAATTCGCAAATCTCTATTTTAAAAACATTCATAAGGTTAA
AAAAATGAGAGATGAAATGTGTCTTTCAAAATTCCTTACGTGATTGATAATGCCTATACTCTCTTACTATCTAAAGT
CTAGGTGATATGTATATTTTTTTTAAAAAATAAAATGTCTGTATCAGTGAAGGAAGTTTACACAGATAGCTTCAAAG
CTGTGGTTTATCTTTGGAGGATTAATCTATTTCTCATGCCAGTGTGTTGCTACTGCACATGTTAAAAAGTCATCCTG
TGGTGTCTGGGGTGACAAAAGATGGGAATGAGTTTTCTGAGAACTAATCAGCAATACTTTGGGAACATTTAGGTCAT
GGTTTCCAATTAACTCTGGAGAGTTTGAGTAATTTAGTACCAGACCTCAAGAGAGAGGGGATGAAAACCTCGTTAAT
TCATATGTTGGTGAACGGCAAACCAGCAAATTTGCATTAAAAATGGATTTTTATTTTAAAGCAAAGAGCAGCCAGAT
CTTTTCTGCAATAGTTTGGGTAGGAGAATATCTTTGTATGTATGTGTTCCCTTATGTGTAGGTATTTGTATGTTTCA
ACGACCCTGCATATGGCAATAACAGAAAATTAAATTTGTGCTCTAAAATGAAGACCAGGATTCAGTGACATAATCTT
CCTTGTGCCTTTCTTTCTTTTAGTACAATGAATATATCAGAGAGGAGTGTATTCCAATATCTGTCTTCAGAGTTACA
AAAACTTCTTTTCTAGAATGCAAGACTTGGGCTATACCCCCAGCTCTGCCACTTAACTTGTATACAACCTTGGGAAC
ATCATTACAATTCTCTCAGAATCAATCTCTCCAGCCCTAAAATGAAACCAGCAAAAGCCTGTACTGTATATCTAAAA
GGTTTTTTATTTTTATGAAAATTAGTTAGGCAAACTTTTGTTAAGCATCCATCACTCTATTTTGAGATAAAGCCTTG
CTGGATGATCTCCACCTCTTTTGATGGAAAGAGTAAAACATGTTTAAGATACATTTATCACTTGTTTGGCAAATTGA
GATAGAAGTTTATGAAAGCAGATTGATATATGTTACATTTGAGCTACTGGGAAGGACTCCAGATGGTTTATAGCCTT
AATTACATTGTAACTCTAGTTAAATGTTTACCTATCTGTACCCTCTGTTAAACTTGAATATGTTAAATACCAAAGTC
CATGTATTATTGGATTTTCTGTCACCATCATCAGGCACAGATCCTGGTACACAATAGGTACGGAATGGATGCATGGA
TGAATTATTGAATTAGATGTTGGTAGGCATGTGGAAATAAGAATGAGGTTCAGAATTAAAGATAATCTGTATCGAGT
GTAAAGCCATTGGCAGAGAATGAAATATCCAGCTGAGTATACATAGAAAAAGAAGGTAGGTAGAAAAATGGAAAATA
TCTTATGAAGTGATGATAGAATAACTCTGAATATGTTTGAAAACATATAAAGAGTTATGTGGATGTTAGCTTTAAAA
ATTATCTTCCATGCTGTACATTAGATCTGCCATTCTTCATGCTGTGGATGAAAAGCAAGCATCAGAAGTTAAATTAA
AATGATGTCATATATTCCTCGCCTTACAGTTTCATAACAGAGGAGAAAAGAGAAACATTCTCTCATTGCCACCACCC
TTCTCCAGTCATATTTCTAGGTAGATGTTGCCCAAAAACAGATAAAACCACAGAGTTGGTTTTGCTAGGAATGGACT
ACTAATCCAGGCAATGTTGACAGCTTTTGCTTCTCATTAGTGCACGTTACTAATAGAATTGCTAGAGATTAAAAGGA
ATCCTTTCTACAAAGTGCTGTATATCCATAGGTGACAAAATTCTAGCTTCCCCTCACAAGTACAATATAAAGTTATG
TTTTAAAATCAAAATGCAATTTACTAGCAAACTAGTAGGAACTGTTATGGTTACAGGAAATTTGAATTTCAGATTAA
CTCTGGTTCTATGAGTAGCGGTTGATATGGCAAGAATCATTTTGATCTTACATCCAGGTGCTACTAAGGTCTCTCTG
ACCTATATCTCACCAAAAAAAGGAACAAAATAATGATCCTTTAATCTTTCTCCTAAAATATCATAGGAAATGATAGT
GGCTAAATTGCAAATAAACTAGGAAGGAAAGATTCAGAGTATTTTATGTGATTACTCTATAACAATGCCAGGCCATA
GTGAAAGTGTTATTTAGCAGAAGACTGAGTTCTTTGAATGTTCCTAATTTATCACATTTTAAAAATAACCTGGGCAA
AATAACCTTTCATATCAGATTGAGCCTTTTTCTAAAAATACTCAATATGTTTCTGTAATTATACCTACACACTTACA
ATTCCACAGTATAATGCACCGATAAAGTATTTTTCATCCATATATCTAATAGTAGAATGGTGTGTATACAATAATTA
AGCTCTTTAGGCTTACCCCGGAAAGCAACAAGTTTCCCTTCCTTTTTCCTTTTTATGTATTATGTTGGCCATAAGAA
ATTGATGATATTCAACTCAATGCAGTCTTAGAGATTTATTCAGAAATACCATGGTGTGTGTGTGTGGCGGGAGTAGG
GTTCTAATGACAGGTCAGAACTTACTTATTTGATTTCTTCATTGATAATCAGGTCTTAAAAAGAAAATGGGTATGCT
GAAAACATGCCTTCTGTGATTCTTTACCTTCATGTGCAGTTGTCTCTGGATAAACACTTTCTTTGGCACGTATAGGG
TTGCACTAAGCTTTATAGCTCCAACACTCCGCCCCTTCAGTAGATTCTTGCTTGTAACTGATGATAATGCAAACCTG
TATTATCTATAGGTCTCCTTAAAGGGCAACCAAAAGTTCAGTAGCAATTCAGGCACAATTACTGCATGTGAGAATCC
TCCATCTTGTTCCCTTTGGAGACCACATATATTTCTTAGGCAAGTATATTTTTAAAATCCTTGTTCAGCATGACAAT
TCAGGAGGTCAAGTTCTCCCAGAAAGCAGATTCTGAGAAAGTGATTAGCATGAAGGAATTTTATTGGAGAGTGCTCT
CAGGATTAACACCTGTGAGCGGAGGAAAGGAAAGGGAGCAGGATTGGGCAGAAGGAGAAGCTGGGCTACCATACAGT
CACAACTACAACACAATCAACCCTCCGCCTCTCCTTCCTAGCCTTCCCCAGGAGGATCTCTGAAGTCTGAAGGTAGA
ATAGCCCTTCAGAATTGTCCTGAGTTGCAGCAAGGGACCCAGGATTTTATACCCCACAACTCTCCCATCAACCAATA
CGTGCAGCCCGTCTCGGGGACATAGTGGGTAACTTTGGGCTAGGCACCTCTCTTTAGCTGAGTCCAGCTCTCAGACA
GGAATAACAGCTGAGGACTGTCAGCCAGTAGCACTACCAGCAGCTGGGGTCAGAAGTATTTCAGTCCTGAAAAGGGG
TCCGGGCAGCCCAGCTTAGCATCTACTATGCCAGTCGTTCTCAAATCTGGTTCCTGGCAACTGTGATTCTCAAGCTT
TAGCATATATTGGAAGGCTTGTTAAAACACAGCTTGCCGGATTTTACCCACAGAGTCTCTGATTCAGTAGAGCTAGG
CTGAGGCCTGGGAATTTGCATTTCTAATAACTTCTCAGACGTTGCTGGTGCTGCTGGTCCATGGACTATGAGAACAC
TGTTTCATGCTGCCCTTATTTACATACTGAGAATGGTACACAGTGCTCTTATGAATAGAATGAAAACCTTTTGAAAT
CACATTATTCCTTACTCCATCAAATTCTCAGCTATTTTTGTGCACCATAAAGCTGGAATAGCTGATTATAAAACTTT
GTTATGTAAAAAAGTACTTAACCAATACAGTAGATTCTGTTTGCAAAGCATTATTACAGTTTCTAATATCTGGTCAT
TGTTACTTGTAAAATTCAGCCAAATTTTCTCCAGGGCCTGTAGTTTGATAACTTGGACAAAGGAATTTAAAAAAAAA
TCTAATTCAAGACCTTTGGTTTTTTTTCTGAACATATCTTTTTTTTCTTTATGATTCTTATTTTTACATTTTACTTA
TCATATAAGCCACTTAAACCCATATGGTTCCGGAAAATTTAAAACTATATGATACATTTAGAGCATGTTGAATGCAC
AGATATGGAAATTAAGTATTCTTGACTCATTCTAGACTAGACCTGGCACAATTAAAATTTAGGGATTCAACGTACAC
ACACATAGATTCCGAGAGAAATGTTGAAGCCGTAAAACCCCCACACAAGCAGGAAACAACAGTCTTACCTATTATTC
AAGAGGCACGTAAAGGAGCTCATTTGAGGAGATTTTCTGCTGTTATTGCCATCGAATTTTTAACGTATTTTCCAAAT
TAGAAAATATTCAGCCTGATGTTGTCAATATTTCAGACCACAAGGGTATCATTTAGGAAAATGGTTTCTTACTGTCC
TGAAAGAGTTACTGTTCTTCCCTAAGGGCCTAATTTACAAAGCAGCAAACTTGCTGGTAGGATTTGGCTGAAAATCA
CATTGTCTCGGTAGAACTCTTTCATCTGATTTATGTGCATTGCATTTTGCAAATAACTCTTGGAAAGTTATTTACTA
GTTACTTTCTCTGGAAGCAGAGGGTAAGCGGCATTTCTAGTTTAAGGATAGAGGAGCTAAGATGCATCAAGCGCAGC
TCATCATGAAGCTGATGCTGATAAAATGCACAATATTACATTCTCTAAGTTTCACTCTGCCATGGGAGAATTTCATA
TTTTTAAATTTTGTTTGAAATTGGACTACATTAGAAAATATGTCAAATGTCTAACCCTGCATTTATATTCTGGAATG
TGACAGCTTATTTCTGTTCCAAATTTTGCACTGGAGATGGAGTAAGTCTTAATGCAAACTGCATGAAACTGCCACTT
TTATAGGTCACACCCAGTCAATTGTCAGCAGTTACACATGGTTCAAACTGTAAGGTGTATGCCCAATTGTAGCATTG
AGATTCGTGGAGTTGTTGCAGTGGTTCTGAATTTTTCAAGCATGATACATAAAAAGATAAATGACTCTTTTGATATT
TCTCCTTGCATTGATAGTTTGCCTGAAAACTAGATAAGCAGGGAGCCGGCAGTCCACGTTAGCCCTTGAACTACATG
AGGTTTAATTTATTTGCCCAACCAGAACCCTACACTACCTTTCAGCTGTGCAGTATTAAAGTTTATTTAGGAGTTGA
TAAATAGCTTAGTGCAATGCTTCCTTTTTTCCAGTAGCTACATCCTCATAAACCTATTCTACCCTCCACCAGTTAAT
GCAGACAGAAGATTTTTATCCAGTATGAGCACTGAAACTCCACTGTGGAAGACTGTGTGCTCAGCAAAAACCTCACC
CATGATGAATAAACAGCTCTTCCGGGGGCTTTGCTGCCGCTGGCTCGGCAGGAGTTGTTTATTGCCTGGTTTGCACA
TCCCATGATAAAGTTGCTGCTGAAATAAATTGCAGTTTTGCATAATTATTGACAATCACATCTTAACAAGCAATGTG
TATCATATTCAAGTGTTCAATTTTTTAAAATCCATTTTTAGCTTATGTTTAATCCCAGAAAGTGTTTGTGTAGTAAT
AGAAGGCAAATAAGACATTTAAATAGAGTACTAATTTCCTCATTGCAGACAAAGTTTACCTGAATCTTTTTCCATAG
GACTGTTACTGCCTAAGGCAATTTTCCTTTCTAAGCTATTATTATATAGATATTTGCTGAGGGCATATGTGTGTGTA
TCCACAATACATGCATTTTATATATATATATATATATATATATATGATCAAAAATATGAATACATTTTTAGAGTTTT
TGTCATGAAAGAGTTTGTTTCATCTTTTTAAAATATTACAGGAATGGGGAAATGGGATATGGGTAGAAGGAACTAAT
GTTTTTGAGTAACTGTAATGTATAACTGTATAACGTGGGGCACTCAACTTCACAGGAATTTTTTATTTTAATTCTCA
TCACAGCAATAGATATTGCAGATGAGAAACTGAGAATCAGAGAGGGAACTTGCCATATCACGTAAGTGGTAAAGAAC
ACTGGGAATTGAACTCAGATCTGCCTAGTTTTTAAAACTCTACTCTTTTTCATTACACATAACATTTTTATTTTGGA
AAATGTTCTCAGTTGTATGATCAAGTAGTTAAATATGAAACTAACACAATAATTATAACTGATGTCATGCAAAATGA
TAGTTTGCACAAAATGATAGTTTCTATGAAATGTTATTTCTTTACTTGTTAAGTCTTTCTTCCTTTGCCCTCCAATC
CCCTTCTTTTTGTCTTTTCCTCTAGTCTTTTCCTTTTGATTCTAGGTTTGTATTTTCTTGACTTTTCTCCTTGCATA
TCAAATCCTTGTTTTCTGCCTCAGAGCAGCATCAAAGACAAGCATGGTACAGGGATTTTAGGGTTTTAACTATAAAG
GTTTGTCTCAAATTTGGCAGTATATTAAAAATAAGCTTTCAAAATTGACCAACAAAAACTACAAAATTGAAAAAAAG
GTACTTTGAACTTTCACATGTTCAAATATATGTATATATATTTCACATATATATATGAAACCTCCTCTGTGGAGAGG
GGTTTATAGAAATCTGTAATTGTCATTCTTGCATGCCTTCCCCCATACAAACGCCTTTAAGTTAAATAAAAATGAAA
GTAAATAGACTGCACAATATTATAGTTGTTGCTTAAAGGAAGAGCTGTAGCAACAACTCACCCCATTGTTGGTATAT
TACAATTTAGTTCCTCCATCTTTCTCTTTTTATGGAGTTCACTAGGTGCACCATTCTGATATTTAATAATTGCATCT
GAACATTTGGTCCTTTGCAG

[0253] Homo sapiens dystrophin (DMD), intron 54 target sequence 1 (nucleotide positions 1686621-1686670 of NCBI Reference Sequence: NG_012232.1)

(SEQ ID NO: 2146)
GTATGAATTACATTATTTCTAAAACTACTGTTGGCTGTAATAATGGGGTG

[0254] Homo sapiens dystrophin (DMD), intron 54 target sequence 2 (nucleotide positions 1686641-1686695 of NCBI Reference Sequence: NG_012232.1)

(SEQ ID NO: 2147)
AAAACTACTGTTGGCTGTAATAATGGGGTGGTGAAACTGGATGGACCAT
GAGGAT

[0255] Homo sapiens dystrophin (DMD), intron 54 target sequence 3 (nucleotide positions 1686710-1686754 of NCBI Reference Sequence: NG_012232.1)

(SEQ ID NO: 2148)
CAGCTAAACTGGAGCTTGGGAGGGTTCAAGACGATAAATACCAAC

[0256] Homo sapiens dystrophin (DMD), intron 54 target sequence 4 (nucleotide positions 1716672-1716711 of NCBI Reference Sequence: NG_012232.1)

(SEQ ID NO: 2149)
TTCTCTTTTTATGGAGTTCACTAGGTGCACCATTCTGATA

[0257] Homo sapiens dystrophin (DMD), intron 54 target sequence 5 (nucleotide positions 1716498-1716747 of NCBI Reference Sequence: NG_012232.1)

(SEQ ID NO: 2150)
GTTTATAGAAATCTGTAATTGTCATTCTTGCATGCCTTCCCCCATACAA
ACGCCTTTAAGTTAAATAAAAATGAAAGTAAATAGACTGCACAATATTA
TAGTTGTTGCTTAAAGGAAGAGCTGTAGCAACAACTCACCCCATTGTTG
GTATATTACAATTTAGTTCCTCCATCTTTCTCTTTTTATGGAGTTCACT
AGGTGCACCATTCTGATATTTAATAATTGCATCTGAACATTTGGTCCTT
TGCAG

[0258] Homo sapiens dystrophin (DMD) intron 54/exon 55 junction (nucleotide positions 1716718-1716777 of NCBI Reference Sequence: NG_012232.1)

(SEQ ID NO: 2151)
AATTGCATCTGAACATTTGGTCCTTTGCAGGGTGAGTGAGCGAGAGGCT
GCTTTGGAAGA

[0259] Homo sapiens dystrophin (DMD), transcript variant Dp427m, exon 55 (nucleotide positions 8272-8461 of NCBI Reference Sequence: NM_004006.2; nucleotide positions 1716748-1716937 of NCBI Reference Sequence: NG_012232.1)

(SEQ ID NO: 2152)
GGTGAGTGAGCGAGAGGCTGCTTTGGAAGAAACTCATAGATTACTGCAA
CAGTTCCCCCTGGACCTGGAAAAGTTTCTTGCCTGGCTTACAGAAGCTG
AAACAACTGCCAATGTCCTACAGGATGCTACCCGTAAGGAAAGGCTCCT
AGAAGACTCCAAGGGAGTAAAAGAGCTGATGAAACAATGGCAA

[0260] Homo sapiens dystrophin (DMD), exon 55 target sequence 1 (nucleotide positions 1716757-1716809 of NCBI Reference Sequence: NG_012232.1)

(SEQ ID NO: 2153)
GCGAGAGGCTGCTTTGGAAGAAACTCATAGATTACTGCAACAGTTCCCC
CTGG

[0261] Homo sapiens dystrophin (DMD), exon 55 target sequence 2 (nucleotide positions 1716821-1716887 of NCBI Reference Sequence: NG_012232.1)

(SEQ ID NO: 2154)
TTTCTTGCCTGGCTTACAGAAGCTGAAACAACTGCCAATGTCCTACAGG
ATGCTACCCGTAAGGAAA

[0262] Homo sapiens dystrophin (DMD), exon 55 target sequence 3 (nucleotide positions 1716891-1716937 of NCBI Reference Sequence: NG_012232.1)

(SEQ ID NO: 2155)
TCCTAGAAGACTCCAAGGGAGTAAAAGAGCTGATGAAACAATGGCAA

[0263] Homo sapiens dystrophin (DMD) exon 55/intron 55 junction (nucleotide positions 1716908-1716967 of NCBI Reference Sequence: NG_012232.1)

(SEQ ID NO: 2156)
GGAGTAAAAGAGCTGATGAAACAATGGCAAGTAAGTCAGGCATTTCCGC
TTTAGCACTCT

[0264] Homo sapiens dystrophin (DMD), intron 55 (nucleotide positions 1716938-1837156 of NCBI Reference Sequence: NG_012232.1)

(SEQ ID NO: 2157)
GTAAGTCAGGCATTTCCGCTTTAGCACTCTTGTGGATCCAATTGAACAATTCTCAGCATTTGTACTTGTA
ACTGACAAGCCAGGGACAAAACAAAATAGTTGCTTTTATACAGCCTGATGTATTTCGGTATTTGGACAAG
GAGGAGAGAGGCAGAGGGAGAAGGAAACATCATTTATAATTCCACTTAACACCCTCGTCTTAGAAAAAGT
ACATGCTCTGACCAGGAAAACATTTGCATATAAAACCAGAGCTTCGGTCAAGGAGAAACTTTGCTCAGAG
AAATAACTTAGGGATTGGTTTATTAAATTTTAAAAGTTGACATTTTTGAGTGTTTATTTAATATTTTACA
GGGAAAGCATCTGTATGAATTGTCTGTTTTATTTAGCGTTGCTAACTGAATCAGTTTCCCTTCATTACTT
TCAAATATGTTTTGAAATGTTAATCTGGCATTTTGTAGCTTTCTTCCTAACATGATCTGTGAAAATAAGA
ATGAGATGGCTGAATTTGTCGTAGTTAATGATCAAACAATTTTCAGACAATTGTTTTTCCTAGAAACAAA
AATTATTTCCATAAAGTTCCATATGCATAAACAGTGAAAACAGAACGTGGGGTAGTTTTGTTTAAATGAA
GTCTTGGTGAGAATCATATTCTGTAGTACAAGGAGGCTCTTAAAGTTTATTCTCAATACCTGATATAATT
TTCCTGAACTATTATGGAGTTTTGTTATGTATAGTTGGTTTTTCTGACTTGATATAATAACTTTACTAGT
CTCTCAAATACAATTTGGATATAAATCATTATAATAAGATGATTGATTTTTTAGACTAACTTTATTTTTT
GATATTTTTAAACTATTATGAAAAACTATTATGAAACTATTATGATATTTTTAAACTATTATGAAAAGTA
TATTCTAGTTTGAATAATTCCAGAATCAAATCATAATAAGCAGAAGTTCTTCTCCTCTCCCTCCTATCGT
TCTCCTTCTCCTGTTTTTCTTTTTTGATATGATAGTTGATCTACTTTGCTGCTCTGTTGCATAGAGTACG
TAACAGTGGCAATGTATGGCTCCTGAATTTATCGTTCTTGCTTCATCATCCTGCTTTGACCCCACTTTCT
CCTCCAAAATGCGTGTTGAGTTAGTTTGATCATTTGGAGGTAATTTGTTTGGAACAGTATCAGACTTTAT
AGATATCTCCCATGGCTTGTGATAGAATATAAGGGCAATGCAAATGTAGAGTTTTTTGCTCACTCTTCGA
TGTATGGTTAGACAATGTACCACTGTAATATATTTGGCTTAGGCTATTTCATAAATAAAATTTTATTATA
AAATATTATAAATGCTGATAAAGCTACTCCAGAATTTTAATAGATATGTGGGTTTCCCGGCCAGATGCGG
TGGCTCATGCCTGTAACCCCAGCACTTTGGGAGGCCGAGGTGGGTGGATCACCTGAAGTCAGGAGTTCGA
GACCAGCCTGGCCAACATGGCGAAACCCCATCTCTACTAAAAATACAAAAATTAGCTGGGTATGGTGACC
TGCGCCTGTAATCCTAGCTACTTGGGAGGCTGAGGTGGGAGAATCGCTTGAACCCAGGAGGCAGAGGTTG
CAGTGAGCCGAGGTGGCGCCACTGCACTCCAGCCTGGGTGACAAAGTGAGACTTCATCTCAAAACAAATA
AATAAATAAATAAAAATACATGGGTTTACATTTTACCCATCAGCTATGGTAGGTAAATAATAAGCTTTGA
TTAAGTCTATTTTAGTCTATTTTTAGCAGATTACTTTGAAAAATAAAGAATAACCCAATGACTAAAAAAT
TATTTTATGTCAGGGATTTAATAAAACATATCTTTAAATCTAGTTGAGGGCAAAAATACGTCTATTTTCT
ACTATACAATTTGTATTTATATCTGCTGTATTATATAATGAAAATTTATCTCTATTTCTAATCTCAAGAA
ACTGCAAGCTTCTGAATCATTAAAGGGAAGATTCACCATGTGTCCTAACTATATTTACTATGGAAGCATG
GAAAATAAATATTTTATGTTTAGATTTCTGATCTCTCTTTCAAAAGCAGTTGGAAATTATGCTGAGAAAA
TGTCTTAGCTTATCCCATGTTACTCAAGAAAATGTATTTATTCGTTTTTGTCCAGTGGCTTAACCAAACC
ACAGTTTATTTGTTGCTCACATAAAGTCCAGTGTCGATCAGGCTACTCTTTTCCATCTTTGAGCTAAGGC
ACATATTACACATAACTTTCAGTGTACCCGAGGTAGAAAAAGAGAGAGCTTGGGAATAAGGCAGGGGCTT
TTTACTGTCTCAACCCCAAAGTGATAAACTACATTTATTCTCAAAATCCAGATAAAACTCCCATAGAGCC
TCTGAAAACCTCAACATTTGCGTCTTAACTATAATAAGGTTAACTAAGATTCCAAAATTATTTTAAAACA
GAGACAGTTTCCCTCTTCCCTGGCAGCTAATATTGTATTTTCTATAAATCCACTTGCCCAAGGTTTAAAC
TACATTTTATGGATTGAAATGACATTTATAGCCAACTCCTGATTTTTAGTTAGATGGTTGGATAATGATC
TTTTGATGAAAGACTCGGAGATGTCATGGTAAAACGGTGAACTACTGAAACTATTGATTATTGTTAATGG
CACATTTCAGCTGATTGAATTGAGTCAAGAAACTGGTGTTGAAGAGCAACAAATGGAAATGCCGAGCTTG
AAAATAAATAAAGCAGCATACCTTAAGAGATTACATGCAATTTCAGTATTTCAGCTAAATGGAAGTGTTT
GCTTTTTTTCCTCTATGAATTTTTATTTTGAACAAAAGGAATTTTCTATAATATGTAGGTAGGAGAAAAG
TGAAATGGCATGCTTTTTCACTTCATTTGAAGAAGCTGGTAGCATTGTATTCATAGATTCATGCTGTATA
GCAATCATAGTTCTCATATATTAAAAAAAAAGGAAATTTGAAATGCCTAGCCAAAGCAACAGCTCTGCCA
ACAGATTTTGATATATCTGTCTACCCCAAAAGTAGTGATGATTTACTTCATACAAATGCTAGTGAATGAA
GAGAGAGGGTGAAAACCTTCACAAAATGTGTTTTTCTCTAAGACTGTCAATCCGTTTTTCTATATATGGA
GACTCCAGCTCTTGCTAGACTACCTATCACTTTCGTCTATCAGCCACTTCGTAAGATATTTATTCTCTCA
GCAATAATCATAATTCATAGATTCTTTAAACATACATGTAATATAAAGCATATACATTCTGAATGGAATT
AACATGATTAATTCTTCTCTGAAAGACATTAGAATTTCCTCCCGTATTATAAAAAGGTGTAACTCACTTT
CCTTACTAAAATCAAGAACTTTACCGTCGTCCTTGTACTTCAGGATAAGGGGGTGTTTCTTATAAATATT
GTTATTTCTGATATGCTAACTGGAATTTTTAAGCAAATGTATTTTTATAGAACGCCATACAAAGCCTTTA
GGGGTGAAAGTTTCAGGATTTTTAAATTGCAGATTTATCCTTTAAATAAAAAAACTATATTCGTAATTGA
ATCGGATTATTTCTCTATCCAAAACATTTTCTGCTTTGGGCCTAAGAAGAGTTGACAAAGCTGTTCATGG
TTCAAAGTACTACCATAAAACCCTGGGTAACTAACTGAAAATGGAAAGACTCTGTCTTTCTGAATATTTC
ACAAGAGTTTCACAAATATTAAGTGGTTCTCTAAGTACCCCTGAGAGATCATTGTAATATTAGCTTGTAA
AGACAATGTGGGGGTGTGGGTATGTGGTGACCTTTATGATGTTCATAAAGGTGGTGTAATTAACATATTT
TTCTCAGCAAGACAAACTAAGGAGCAATAAATATATGAGATACCTTCATCTGTGATCTGGGTCATGTCTC
AGGCCATATCTTTCAAATCACTCCCTTCCCTAATCTCGTGTTTTACCTACGTCTCCTCTCAATCCCCCCA
TTATAAAAATTGTCTTCTGATGAATAAAACATTTCCAGAGAGACAAGTTTCATAAAGTTTGAATTGTACA
TCTGAGTACACCTATGAATTAAGATATCTTTGATTTCTAATATGTTATTAAAATTGGGTGTGGTGGCTCA
CGCCTGTAATCCCAGCACTTTGGGAGGCAGAGGCGGGCGGATCACGAGGTCAAGAGATCGAGACCATCCT
GGCCACAAGGTGAAACCCCCGTCTCTACTAAAAATACAAAAATTAGCCGGGTGTGGTGGAGTACGCCTGT
AGTCCCAGCTACTCAGGAGGCTGAGGCAGGAGAATTGCTTGAACCCAGGAGGTGGAGGTTGCAGTGAGCC
GAGATGGCGCCACTGCACTCCAGCCTGGTGAAAGAGCAGACTCTGTCTCAAAAAAATAAATTAAAATAAA
ATAAAATAAAATTGGAGAAGTTTCTCACCAAAATTTTGGCGCACGGATTAATTCTGAAGAAAGAAGAAAG
AATGCAATCTTAGTAGCACAATTAGTACCTTGAATAAATTGGAGTATCGTATTTCTTGGACTATCTGAGA
ATGCAGAGGCAATTTAAGGATCCCTAATTCTAAGGAGAAGAAACCTTTAGTGTATTCCTTCCTGTTGCTT
TAGTTTGAATTGAGTTTTATATGTATTTTTTAATCTTTCTATTTTGATTGTTGTCTAAAGAGTGTGAAAG
TGAATTTTGATATTTTTATTTTGCCTGGCGATGAATGCCTTCTGCTCTGGATATTTAAAAATTATATACA
CATATATGTGTGTGTGTGTGTGTGTGTGTGTGTGTATATATATATATATATATATATATATATATAAAAT
TTTTCTGAGAACTTTTATTAATTCAGCGTATCTTTGCTAAACACCTGCCATGTGTCGTGGTGTTAGGTCT
GGTGATACAAACATGTTCAGAGAGATGATTTTCTTTCTTTTTTGGGGGGTGGGTAAGGGAAAGAAGGCTT
ATACAACAGAATCTTATTTCTCACAGTTCTGGAGGCTGGGATTCCAAGATCAGGGCCTGGTGAGGGCCCC
TCTTCCTGGTTTGCAGATGGCTTCCTTCTCTCTGTGTCCTAACATAGCAAAGAGAGACAGAGCTCTGATG
ACACTTCCTCTTGTTATAAGGGAACTAATTCCATCATAAGGGCCCCAAGAAAGGTGCTTTTCAAAAACAG
TTCAGTAAAAGTACTGGGTTGTATAATCACTTTAATGAGTATCAATCCATATTTTTAAGATAGAAATGAA
TGAAATTAGTAAAATAGAATAGAAATAAGGAGTCCATCACTTTTAAGTAAGTTTCAATATTGTTCGTAAA
ACTTTGGTTCGGTGGTTTGTGTGTGTGTGTATTTGTGTGTGTGTGTGTGTGTGTCTGTCGGTGTGGAAAT
ACTGGATCACTTTGTAACATATATTCAAAAGCCTCTGTATTTTAACATTATTTCTGCCTTTGAGAGGTTC
ACATTCCAGAGGTGAAGACATACATCCTAAGACAAAATTATAATAGCATTATGAGAATTACAGTAGAGAG
CTGGACAGGGTCTAGCAAAAACAGAAGACTAGGCTAAACCTTCCAAAGAGGCCAGGAAACTCACCTAGAA
CGGTGGATTTTAACCTTGCTTATGCACTGGGGGAGATTTTAAAAATATCTCTGCCCACAATAGATACCAA
CTGAATTGAGCATAGCATGTCCTACCCATGAATCTATTGTCCAGTGAGAACCTCTGTTTAGAGAAAGTCA
CCTTAGAAGAATTGTTAGGAGTTATTTAGGTTCATGGGGTTGAAAAGAGCATTCGTGATAGAGGAAACAC
CATATCCAAAGGCTTAGTCAGTGTGGTAGTGTGAGAATCTGAAGGAACTTGGCTGGGGTATGGTTGCTAC
AAGAAATGAAATTAGATCAACTGGGGCTAAATTATGTGGAAAGACAGCATGATGTAGCAGCTAGAGTATG
GACCTTGTAAGCAGGAAGACCCCTTATTTAGCACTTACTAGCTTATTGTCTGACCTCTGAGTCCCAATTT
TACTCTTCTATACAATGAGTACATCACAGGATTTTATCAGGTTTAAATGATAAGATATATGTAAAATGCA
TACCAGAGAGGCAGACTATTGGACTCGAAGGGCTCAGTAAGTGTAAGCTGGCTCTCTCTGCCCCTTGCCA
CCTATTTTTCAGACTCTGGACTTTTATCACTTTAAGTCATAGCCTAGTTCTAAGCAAGGAAATGGACTAA
TCAGACATGTTTTTAAAAGATCATTCTGGTAGTGGTTAGGAGAATGAATTGGAAAGATATGAGACCCATG
CAGGGACAACAGTTAGGACATTATTTCTGTAATAAGCCAAGCAAGAATTGATGATCAAAGTGGTGAGGTT
GAACAAACAAAACAGATACGTGAGCTATTTGGAGATAAAATCAACACTGTCATATGTTTTGTGGGAGGTG
GAGGTGAGCAGAAAATGTGAGGTAAAATGAGAAATCAGTGCCTGCTTACCACTTGGCATGATTGACTGAA
GGTAGTGTCTTCACTCAATCATGAGTTGCAGAATTCAAGATGGCAAACAGTTGTGAGGAGCAAAGTCAAG
AACGTGTTTGATTTTGAGGTATCTGTAAGTGAAAAATCAGAGGTGAAAACCTTACCTCTCTTGAAGCAGT
TGTGAATGTAAATCTAAGGTTTGGAAAAAGATCTGGGTTAAAGATTTAAAATTGAAGGACATCAACATGG
AAGCCATAGAAATAAATTATATTACACACAAATTTATGTCGTTATTTGAATTTCTCCATGGTCCACTCAG
AAATATATCTAAATGTCACCAAAATGTTACTTACTGTAGTACAGAATTGGTATTAAGTGATACTATTGTC
CATGTTATTCAAAAAGACAGTTATAGGGACCCTCTTAATAAACTAATTGTGAAAAAGGCAAAGAATTAGC
AAAGCTTTGGCATAAAATTCATATCATGGGCCAGGCGTGGTGGCTCATGCATATAATCCCAGCACTTTGG
GAGGCTGAGGTGGGCAGATCACCTGAGGTCGGGAGTTCGAGACCAGCCTGACCAACATGGCGAAACCCCG
TCTCTACTAAAAATACAAAAATTAGCCAGGTGTGGTGGCACACGCCTGTAATCCCAACTACTCGGGAGGC
AGAGGCAGGAGAATCGCTTGAACGTAGGAGGCAGAGGATGCAGTGAGCTGAGATCGTGCCATTGCACTCC
AGCCTGGGTGACACAGTGAGACTCCATCTCAAAAAAAAAAAAAAAAAATTATGTCATGGAAAAAGTAAAA
GTCTTTGCATAATGTATCCAAGATCATGAAAAACTCTTTTCAATAAGATAATTAGTTCCTTTTCTTATAT
AAACATGGAAATTTTCATTTTTCCTTTTATTCTCATATTGATACTATAAAAACCCCATCCTCATTCACAA
TACTACTGTCTCTACCCTCGATAGATACCAGTTCAATTGAACGTAGCATGTTCTACCCATGAATCTATTG
TTCAGTGAGAACCTCTGACTATAATGCTCAGGAATACTCAAGACTCACATGATTGTCTTCTTGCTATATT
TAGTTACTTTATTATTTTCCATTTTGGGACCCTGAATTCCTGTAGATCTCAGAGAAAATCCGAAATGAAA
TAATGAAAATAATTAAAAGTTTAGAAAAGGGAGTCAATGGGGACAAATGTTCAGGACTGGTCTTTTATCT
CCTGCAGGAAGAAAGACTGAATGCAGAAAATTAGAATCCATTTTTCATCCAGTCACCCCAATTTAATGCA
ATATGAGTTTAGCTATTTGATTTTAAGTGTTGTACCGTTTTGGACCATGTTACCATGGTAACATGAACCA
TGTCTCATTCATACGTAAACATGTTAATTGTATTAAAACCTTTAAAACCTACTTCTGGATGTTGCCATTA
CATTAAACAATTATCTAGAATGATACAAAGTAATGACTAAATTGAATAACTTTGTAAATTAACTATTGGA
TTTTGTAATTTTATATCTATAAACCAAAAGAAAAGCCCACATTGGTAAGAAGACACTGTGCATACTGAAA
AGTCAATTTTGTTAGCCTCCAATAACCATTGTGTTTTATTCCTCGCAGAGCTTTTGTGAGGATCTTATAA
GGGAATAAATATGAAAGCACTTTGAAAAAGCTTTCAAGTGAAAGGTCCTTATTAATTTTATGAATTACCA
TTAAACAAAAGTCAAACTGAAGATGTAAATCTAATAGGATGCTCTTAAAAGTCAATGGATCAAAGTTATA
TTAATTAATAAAGAATAATAACTAAATATTTTATGTTTCATAATTGGCAAAGTATCTTTACTGTCATTTT
CTAATTTGATCCTTAGTGAAAACCTGTGATGTTGGTACTCCTATTATTTCCATTTTCATTTGAGAAGAAT
AAAATTGGAGAGGTTAAGTAATTTATCTATTGCTACTTGTTAAAATAACTACTAAATTTTATTACTCCCA
GTTAGGAGGGCAATTATATAAACTAAAAGCTTGTCACAATAAATGTTTACTTTTCTGGGATTAAAGTCAT
CATGTATTTTTCAATTATTAAGGGGGGTAATAATAATAATAGCTACCTTTTTAAAATAGTTACTATGTGC
CAAGGTGTGTACTAAGTGCTTTGCTTGCATGATGTAATACCATCGTATATTTAGTACAGAGGAAAAACTG
AGAGGCTGGGTAACTTCTACTAAGGTAACACACAAGTACTGGTTGAGTATCCCTTATCCAAAACACTTGG
GACCACAAGTGTTATGGATATCAATTTTTTTCTGATTCTTTTTTTGGATTTCAGATTTTTTCAGATTTTG
GATTACTTGCTTTATAATTATGGGTTAAGCATCCCAAACCCCAAAATTCAAAATTGGAAATACTCCAATG
AGCATTTACTTTGAGAATCATGTCGGCGCTCAAAAATTTTCAGCTTTTAGAGTTTTTTGGATTTTGGATT
TTCAGATTTGGGATGCTCAACCCGAATATATAGAAAAGTCAGCATTTGAACCTAAGTTTGACTTTCTGAT
CTTCTACCAACTCTACTGTCCTACCCATTACTCTACATTGACTCAGCATTACAGGGAAAGACCCAAGATC
ACCAAAAGCAAGCTTCAAATCACTCATCTAATAGAAATTAGTGGAAATATTTCTACTTCCTAAACATCCA
TCTTTCCTTTACATTTTAAAGTCAAGTTTCTACATCTGCCTCCCAACTGAAACACTTCTCTATGAAATCA
CCATAACTACCAAATGCAAATATTTTTATCAAGTCCTCATTGCCCTAGAAATCTACTCATATTTTGTTAT
TACTGCTCACTACAGCCTACTGAAAAATGTCTCACCTTTTGACTTGCCAGGGTGATATATTATACTAATT
GTCTCCTTGTCTCTCTAAGCACTCATTCCTTCCTCTTTCTTTCTTCTTTTTTTTTTTTTCACTTTTATTT
TAAGCTCTAGGGGCACATGTGCAGGTTTGTTACATGGGTAAATTGCATGTCATGGGAGTTTGGTGAACAG
ATTATTTTGTCACCCAGATAATAAGCATGGTACCTGATAGGTAGTTTCTCAGTCTTCACCATCCTCCCAC
CCTCCACCCTAGAGTAGATCCTGGTTTCTGTTGTTCCCTTCTTTGTGTTCATATGTACTCAGTGTTTAGC
TCCACTTATAAGTGAGAATATATGGTATTTGGTTTTCTGTTCCTATGTTATTTCACCTAGGATAATGGCC
TCCAGCTCCATCCATGTTGCTGCAAAGAACATAATCTCATTCTTTTTTCTGGCTGCACAGTATTCCCTGG
TGTATATGTACCACATTTTCTATATCTGATCTACCATTGATGGGCATTTAGGTTGATTCCATGTCTTTGG
TATTGGGAATAGTGCAGCAATGAACATACAGCTGCATGTGTCTTTATGGTAGAATGATTTATATTCCTTT
GGGTATATACCCAGTAATGGCATTGCTGGGTTGAACGGTAGTTCAGTTTTGAGTTCTTAGAGGTATTTCC
AAACTGCTTTCCACAGTGGCTGAACTAATTTACATTCCCACCAACAGGGTATAAGCATTCCCCTTTCTTC
ACAACCTCACCAGCATCTGGTATTTTTTGACTTTTTTTTTTTTTTTTTTTTTTTTTTTGAGACGAAGTCT
CGCTCTTGTCCCCCAGGCTGGAGTGCAATGGCGCAATCTTGGCTCACTGCAACCTCCACCTCCCGGGTTC
AAGTGATTCTCCTGCCTCAGCCTCCCAAGTAGCTGGGATTAGAGGCGCCTTCCACCATGCCTGGCTAATT
TTTTATTTTTAGTACAGACAGGGTTTCACCAGGTTGGCCAGGCTGGTCGCAAACTCCTGACCTCAGGTGA
TGCGCCCGCCCCGGCCTCCCAAAACGCTGAGATTACAGGTGTGAGCCACCACACCAAGCCCACAGTATCA
ATTCTATGCATTCTTTTCTGATTTCATTAATCTCATTATCTTCATTTGATATTTAGTCAATAGTTACTGT
CAGTTATGTGTTAGTTATTATACTAGAAACAGTCTTTTCTCCATCTCCTTTAATCCAATGATTTGAACAT
TTTTATTCCTTTCCAATGTCTGTCCCACATTTCTTACTGTATGTAGGACATTTCTTACTCAAATGTCTCA
CAAATGACATAAATTCAGTATGACCCAAATAGGCCATTTTTTATACCAAGTCTTATTTCCTATCCTGCTG
TTCATCCCGGTACCATCTTTTCAGTCAGAGAGTTCAGATCATATAGTCATTTCTAAATCTCCCACTTACT
TGCCTCACTTTCAAGTTCATTTTTAAGGTCTGTAGATTCTGCCTCCCTAATTCTTTATGACCATTCCTTT
CTCACTAGCCCCTTACCTCCACTCTCATTCACACTCTTACTATTTTTTACCCTCCTCCACTCATTCCTGC
CCACCAGTGGCTCCAATCCAACTTGCAGATTTCCATTTAAATTAAGCTTCCTAAAACATAGCTTAGGTTG
TAACTACAATGCAAATTCCATGAGAGCAAAGATTTCATCTGCTTTATTCACTTGTATATATCCATTGTCC
AAGACTGTGTGTGTCACATGAAAAGTGTTCAATAAGTATTTGTCAGTGAACGAAAATAATATATGACTCC
CCTCTTCAAACACCTTTTTTGACTTCAAAGCCCTTCAGAATATTCTACAGACTCCTTCACCTGGCTCTCC
ACAATTGCCCCTGAGTCTCGTTTCCAATCTTATTTCTTATTTTACCTCTCAATGCACCTTCAACTCCTAC
TAAAATGAACAGCTAGCCAGCTTACTTCTGTGTCTTTCGATGATCTTGTTTTTTGTCTTGAGATTCCTTT
TTTTCATCTAAGCTTACCCAAACATTACCTACTTTTCAAGGAAAGCCATTTTCGAATCTTCCCTTTTTCC
CTGAGCCCCCAAGCTGGAAGACATCTTGTCTCCATCTCAATTCCTATAGGCATTTCTCTGCACTTTAAAT
GACGTTTAGTACTTCTGACATTGCATTAGAGAGAGGCTGGGGTGGATAGTGTTTCATAGTGTGAACTTTG
AAGCCCGACTGCCTGAGTTTAAATCGTGATTCTGGGGCTTACTGACCATAGACGCATTTCTGAATTGCTC
TCAGATTATGGAGCATAAATCAAAAGTAATGACAGCTACCTCTTCAGGTTGTTGTGAGGGTGATGCGAAT
TAATGTACTGAAGTGCATGGAACAGTTTCTGGCACACGGTAAGCACCCAATAAACATAGCTAATATTATG
TTATTACTATTTTCAGGCTTATTTTTATGTATACATATAGTATGTAATTTTATGTCAATATGTATAAATA
GACTTTGGTATTGTTTATTTCACTATCACCTTGAGAGCACAATTCTCATTTGATTTGTGTGAGAAACTAC
TTAGAAAGAAATAGACGTGTGAATGAAACTATGCTTGAAATATTGGTTACTGTGAGTGTTGAAAATCCAT
TTTGTTTAAAGAAAGCTTCAATTGTTAATCTTCCATAAATTTTAGTTCTTAAGCGTTCATATTGACTCGT
TTTGGAAAAGCTCTTTAAAGTCTTGGGATATAAACAAGGCTGAATACCCTCATTCATGATAACAAACATA
TTATACTGAAAATTGTAAGAGAGATATTTTATCTTTCATAATGCCCTCCTTGGGAAAATACATTGACTTG
GCCCTTCTCTTTCAATCAGACACCAAAGTTGAGATTGCCTGAAACACAGTTTGGTAAAAGGAGTTTCTTT
TTCCCAAACATCCTGAGTAACACAGGAAATCACACCAATGACTGATAGATAACGTTAATAAAATTAATAA
AGTTGTTTTAAATGCATACCATGGGGCAGTGGCAATGAAAACATTGAGAAGGCTGGGACTATTTGCCAAC
TTTCTTTGATCTCCATTAGAACCTGGACAAGATCCACATAATTTCAGAACTTCTTCTCCAAACAAGAATT
GAAAAGGTCAGGAAAAGTTTGACCACAGAAAAATGTCAAAGAATTTTGTGTCACTTTCTCCTCCTCCCTT
CCTCTAACCTTGAATAATTTTTTAGGGTTATTGGTCTTTGGGAGCAGACTTTCTAGACCAAAACAAAAAA
AATGATATTCCTCTATGTGATAGGTAACAATCACTACCCATCCTACTGGAAAATTCTCAAAGTGTAAATT
GAGGGGATAAAAAAAGAATCTTAAGTCCTTTAAATTATTTTTAAGATGAACTACATTAGTGCCTCTCTTG
TGCCTTTCATAATTCTGATAATAAAACATTCCAGGTATTAGTCAAAGATTAATGGTATTGAAAATAATTT
AGGTTATCAGCATGTGATTTTCATTCCACATGAGGTCCTTTTGCAGTTTACATGGTTTTCTAAATTATAT
TAAAATAAAATGTCAGAAAGTTCACATTTTTTTCATGTTTAACAGCATCAATCTTTAAAGAAAAGTTATT
GCACAAAGGTCTGTGCATAAATCAGCCATTCTCCGAAGAGGTAAAAGAAGTCATTACGCCTGGTTATGAG
AGAGAGTTTCATGAATGTAAGAGACATAAATCATTTCCCACTGGAGATCATATTAGTCTAGATGGAAGAA
TGTCTGTTTCTTGATAGTGAGAAAGCAACAAATTACTTTTGTTTGCTCCTGAGTCTGTGGTTGTCCTTGA
GAGGTCTGTTAGCATGTTGACTATTGACTATTCAATATTAGCATTATAATAACTTACAATGATCTGAGTC
ACATAAATATAATCTTTCAGTTCTCTAAAGATTTTACTTTTTCCTCTCTAATATCTATTCACCTCCAACA
CCTTTGCAAATATATTATTCTCTGGGAGTTACAAAGAAAGTTATTCTCTGCAGGAAGCAGCATTTCAGTT
GCTCTCAGGAGCCAACCACATTTCACCTCAATTCTTTGCTCCCAATTCAACAATTCAATATTGGATTAAA
TTCAAGGCTGTGACCCCAAATAGAATGAGACCTGGATATTTATGAACCACTTGACCAGGCATTCTTCCCA
TGATTTACTCCATAAATCCTTTTTAGTTTTTGCAGTAGCTTTACAAATATTTGGAAAATGGCTGTGCAAT
GCAGTTTTAAAAAGTGCAATGAGTAGAGGTAGCTTCTTCACCTGGTATGGTAAATTGTTGATTCTCTTTT
GGAGTGGAAAACAAGTGTTCTTATTTGGATGCAACCATTGCATTGATTAGACAACCCTAAATTCATCTTT
CATCCATGACCTGAAAGAAATTTTGAAATTCATGCAATATATACCCGTAGTGGAAAATGTACTTTTTGAA
TGGATTCCTGAATGTGACTTTTAAGAAGAGCTATTAAGAAGTGGGATCTTCTACAGAACAGTAAACAGGC
ATGAAAATATACAAGTTGATAAGATATGGAACTACCCCAAAAGAGGAATTAATAGTGGTGGGGCTTGGGG
CAGGAGGACAGAGAGACCTAGCCAAGGAAGGAAGGGCTATATTATAATAGAGTACAAAGTCCTTTAGTCA
TCCAAGAGAAGGGGCACCTTCTGCATCCCTTATGAGTAAGATCAGAGAAGGTATTCTAGTTAACTTTTGC
TACATAACAAGCCAGCCCAAAACTTCATGGCTTCAGTAAAAATTACTTGTTTTGTTCATGAATCTACAGT
TTGCTCAAGGTTCAATGGGGCTTGCTTATCCCTGTTTCAGTTGATATCAGTTGGGGTAGATTGCCTGATG
CTGGAGGATTCACTTCCAAGAGGGCTCACTCACATGCCTGGAAAATAGGTGCTGACTGTCAGTTTTTCTT
CATGTGGACCTCTCCATGGAGCAGTTTGGGCTTTTTCACAGTGTAAGAGTTGGGTCCCAAGAGCAATTAT
CCTAAGGGACAAGAAATTAAAGCTGCAAGCTTCTCAAGGCCTGCCCTAAAAGCAAGAATGGTTTTGCTTC
TCCCATATTCTATTTGTCAATCAGTGACAGAGCTCTGATTCAAGGGGATGAGAACATAAACTCCACCTTT
CCATGGAGAAGTATCAAAAAGTTTTGATGCCATTTAATTAAAGCTGCCATACAAAGTTTCTTATAAATGA
CACTGAGCTGAATGAATACTAAACAGCAAGTAGTCATTATCCCAGTCAAGAGAAGTTATCTTTGCTCAGA
ATACCCTTTCTCTCCTTGTCTACCTGGAAAATTCAACTCTTGGCCAAAGCCCTACCTCTTCTCGAAAGCA
TTACCAGGCCTTGCCTCTAAGTGTACAATTGGAGATACACCAGTATACTGATGTTTTTAAAACTTTAAAC
TTTTTTCTACAATAAAACATAAATTAAATAACTTCCCTTCTGACTTAAAAGCTGCAAAATGCTCATGACA
GTAACTATATAAATTAAAATTAAATCTTAAGCACGATAAATACCTCTCGAATAGCAACATAGATGCTTAC
TTCTTTATTTCACTTCTTTATTTGCTTTTCTTTGTCTATAGTTTGCCCCAAAGGTATTTTAATAATATCG
GGTTCCATGTATACCAGTGTGTACCAATTAATATTTAGAATATACCTGTTAATAACCTCATTTGCATAGC
CCTACTAATCTGAGCACAGCGCAGCCTTAAGAAAGTCTTAGTTTTTCTCAGTTTAGTTCATCTCTCTTCT
CTTCTCCTCCTGTCTCTCTTATTTCCTATTTCTTTTTCTTTTCAAGTGACTTTCAACTAAGTAGAAAATG
CATTTCACATCACTATGCCGGCCTCCAGGCTCTGTCTATTTCATTCACCCAGGAATGCCCTTTCTGAATG
CTTTCTCTCATTTAGCAGCTATCTATTGAAGTTGGACAAATGATAGAAATTCATTTCTTAAAGAGCCAGA
ACATCATCTTGAACAAGAAGTTAAAAGAATTCAGCAAATCAAAAGATGAGCTAATATGGGTGAATCTTAG
AGGCATTATGCTAAGTGAAATAAACCAGACACAAAATGAAAAATATTGTATGATTCCACTGGTATGAGCT
ACCTACAACAGTCAAATTTATACAGACGTAAAGTTGAAGGATGTTACCAGGAGCTGGAGGAAGAAGAGAA
TGAGGGCTTATTGTTTAATGAGTACCTGAGTTTCAGTTTGGGATGATGAAAACATTCTAGAGATGGATAG
TGGTGATGGTTCAACGATAATAATAATATAATATTAATGTACTTAATAGTACTCAACTGTATACTTAAAA
ATGGTCAAGAAAATGGTACCCCGTTATCCTGATGTGATTATTACACATTGTAGGCCTATATCAAAATATC
TCATGTACCCCGTAAATATATGCACCTACTATGTACCCATAAAAAAAATTTAAAGGCTAAATGGCCAGGC
ATTGTGGGTCACTTCTGTAATCCCAGAACTGTGGGAGGCTAAAGCAGGAGGATCACTTGAGCTCAGGAGT
TCAAGACCAGCCTGGGCAACATGGCAAGGCCCCATCTCTACAAAGAATTCAAAAATTAACTGGGTGTGGG
AGCTCATGCTTGTAGTCCCAGACACACTGGAGGCTGAGGCAGGAGGATTCCTTGAACCCAGGAACTGGAG
GAAGCAGTGAATGACACTGTACCCCAGCATGGTCAAGATCCCAAATCAAAAAGAAATGATTAAAATGATC
AATTTTATGTTGTGTATATTTTGCCACAATACAAAAATGGGGAAAAGCCTATTCGCTTTTAAGTATCCTT
AAAAAGGCACAGCTTCTTCAGCTAACAGACTCTAAAACTTTTTTTAATAGAAGTATTAAGGTATTTAGAG
AGTGCAAAATATCTTATTTTAAGTCAAGAAGTTAGGGTCCTGTTCCTAAACACTAGCCTCTGTAATCCTG
GGGAAGTCAGTGCTGTTGGAGATCTCAGGTTGATCTTCTGAAAAATGATGGATCTAGGTAAAAGATATGT
TTCTCCAGGTTTACATACCACGGACACCATCTTTACTTGGAAACTTTATTAAAAATGCATTGTGTCAGAA
GCTCTCTGGGGATGGGTCGTGGAATCTGCATATGTAAAGAGCCCCTAGGTAGTTCTTGTGCCCACTTAAA
TTTGAGAACCACTAGACCAGATGTTTTGCTTATGGCCCTTTCAGCTCTGAAATTTGAAAAAAAAAAAAAT
GATTCTGCAAGACAGAGTCTCTGTGCTTTTGCAGGATAAAGAAATGAAGAAAATAATACTTCCTGCTTGT
GTTGGAGCATTTTTTTCATTTGGTATCCCCATCTCCAGTGGCTAGCCAATCAAGAATAGTATTGTTTATT
CTTCCCACTGTTTTGAAGATACAAAAGGAAAAGCTAAGCCAGATGACACCTAAAGGCTTCCATTACCATT
TTCATGTTTTTCCCTTTGCATAAAAACTGTCCATGCCTCCATCAGAGCCATGATCACTAGTACAATGTTA
CACTCTAATGACTCATGACATTAAATTATATCTTAGCCTAATATGACCAAATTACAATATCAGAATAAAA
ATTTCTTTTTTCAGGTTGAATCCCATAACTTAATCCAATTATAATACTGGCTGAATTTTTCACAATTATG
TCTCAGTCTTGATTTAGGGAATCTTCTCTTTATCATAAAAATGCATTTTGTTAAACATGTTTCATTATAA
TCAATTTCTCAAAAGTAAAGTTAATCAAGAGAAGGAAAAAAGGTTTTGTTTTGATTTGATTTGGAATGTG
TATGTGTGTTTACTGTATTGAAATAGATTCTGTCTGAAAGACTGTATATAAGATAAAAAGTACAGAAGAG
TAGTCAGAGAGTTATTACCCACCCCTGACTGATGGTGAATAGATTATCTAAGTATCCCGTAAAAGGCACA
ACTCCTTCAGGTATATTTTACAAATTAATTAGTAACTTTCTAGCCAAATTTGTGTCTTAAAGACACCAGC
TAGAACTTGGTTAGTTCTAGCAAAGAAGATTATTTTATTCTGAAACAGGTTTTTGTTGTCGTTTTACTTA
TTTGAACTTTTTTCTTGAATATGTATTTCTTTGCACATAAAATATATTGACTTATGAATGTGATTAAAAT
GGAAAATAATTAGTTGATTTTAGAGAGACAGAGAGAGGAGAAGAGAAGTGTGAAGGAGAGAGGGAGGATA
GAAAGGAGAGAGGGAGAACAGGAAGGACAGAGGGAGAATGGGAAGGAGAGGGAGAGAGAGAGACAGAGAG
AGAGGAATGGAGTGGGTAATAAGCAAGAGAAAAATGCCAATCATATGCTTTGCTAGTGTGTAAAGTCTGA
TAACCCAAGGGAGAGAGGACTACTCTGGCCTAGTGAAACAAAGGAAAGAGAAATATGGTAGAATATTCTC
CTGGTGCTTCACCAAATGTGACACCAGAAGTCTGACAGAAGTCATGTCAGCATTTGAGCTCCATAAAACT
CAGGCTATCGACCTACCATGTGAGAGTCTCAAAATGAGTTTAGGTAGGGGCAGAGGAGTTGAAATCCAGT
AACATATGCAACAGTGATCACACCAGGATTGCACATAGAAAGCAAATTAGTCCTCTAATAGAGACGCCAA
TTTGAAATTCACCCTCTGAGCAGGTTTTTAAGCACACTCTTCTTTTACTTTTCTATTTACAAAAATGGAA
CACCACCAGAAAAACAAGAATTTGAAAGACGAGATGAGAAAAGTAAGTTGTAATTGGAAACAGACAGAAT
GTGTACACAAACACACACACACACGCACACACACGTGCATGCACAGGTGATGAGAGAGTAGTTTGCCTAC
ATGGTGTATCTGACTAAGAAGACTTTTTGCTCTGGTTGTCTTACAGGAAGTGACTAAATCTCATGATGTG
AAATATTTTCTTGCATATTGTATTGGAAAAGAAAATAATTTTCCCAAACTCCTTAGGGGCAGTGTTGTCT
TATAATTCCCATATAGTATATGCTCTTCAAGTAAGTAACTCCAGAGTTGAGTAAGACAAGACTCGTGACT
CAGATGGCATGCTCTGCTCCCTAGACTAGACATTGCATCAGTCTGCCTATACTCACATCCGCTGTTAAAG
GATTGCCTCCAGTAAAATATGTCTTTTAATTCCTTATACAAGAATCTGGAAAAAAAAAGTAAGATTCTCT
ATTTCTTAAATTTAGCAGCAGGTTAATCACTGATAACAATAAAAATACATAACAATCATCTAGCACGGGT
AAATATTGTGGCAAAAATTACACCCTGAAGAATTCAGTCAAAGATATAAGTAAGTACACATCATTGTCAT
GTTCCACAATATATCATCTGCTTTAAAGAAACTGTTATGTAGCTGTAGTAGATTTAATCATTAATCCCAT
TTCTTCTCCACCTTCTGCAATCACAACCTTAACAATGCCTCCTTATGAGTGGAATGTACTTCCCAACCCC
TAGTCTTAGGGGTTGGCCATGTGATTTGCTTTAGCAAATGGTAAATGAGCAGGAGTGAGAGGTGACAGTT
TTCAGCCTAGGCCTTAAGAGATCTATACATTCCTGTTTGTGCTTCTGCTATCATTCTGAGAACACGTCCA
TCTAGGCTGCTGGTCTCAGGAAAACGATAAAAGACATGAACAGCAGGGCTGCACTAGCCATTCACATCCA
GGAAAAGAAATGATTGTTGCATAAAGCCATTGAGCTTTATTCTACATTACTGTGACAATAGCTAATTGAA
ATAGTAAATATACTTTGGTTTTTCCTAAATGCATATTGAAAATTAATAATATTAGCCATCTGTATGATAA
AAATATAAAGCCTATGTTTTATTTTTTAATGGTTCACTGCCCTAAATAAATTTCCAAAAAGTAGATGTTC
CCTTGTCTAGTGATGTCATTATATTTTATTTATACATCATAAACACACTGTTTATTTCTGCTCATTTTTT
TGTAAGTAACATGTGTTACCGCCAATCTTGAGATGATACACACACTTCTGTACTAAATTTTGGAAAACAT
ATTAGCTACCCACTCCTTATATCAAAATATTGCCTAATAATGTGTTTTGTTTTAATCCTTCATGAATTTC
CAGGAGAACTGAACTGATACTTGGGTTTGTGAGATATATGAAAATAGTGAACATGAACTTCTGGTTTAAC
CCTTGTGATGATAATGGAATCATAGCTCTGTTAATTACTCTTGTGGTTTGTCTTCCTAGAGATAATCATG
TACAAAATTCCTTTCCAATTTGTTATATAATATTAGAAATACTTCCAAAATTGGCATGGATTTATTGTTA
TCATTTGTTGGCACAATCATTAAAACGAAACCCATAAAGCTAGATAATTAAATGTTTACAAAGCTATAGT
ACTCAAAACAAAAACACTGTGAAAAGAGATTTTTTAAATAATAGTTTTTGCATGCCTTTTGAATAATTGG
ATTATTCTGAATTTCTTCATGTTTAGTCCCTGAATCTAAGTCATACCGTCTACATAAAAATAGATGTCAG
CTGAAGAAAACCAGGCAATGGATTTGTCTTGACGACAATCTTTTTATATGTTCAGACTTCATTTAACATT
AGACTTGTCTGTATTTGAAATTGGTATTTCTTTACATTTCTGAATTTAGGGAAATGGCACAAGAGAATAA
CATTAATTTCCTCTGCATTTTGGCCTAATCAAATTTGAGCCTTTCAAGAGACACAGCCAAGTCAATTCAA
AGAGACATATGAAAAGACTACTGTTAATGTATCTTTAAAATGAATTAGCGGCATGAACTGTTGCTAGGTG
AGTTAGGTATAGTTGTAGTTTTTAGTAACCCTAAGAGAAGATGCAGTGCATTCTAAAATGTCACAAGGAG
TTTGATTGCTCAAAATTCTGGGAGATTGGCTCTCTGCAAGGCTTCTTGATGTCATTGTTCCTAGAGGAAT
GTTGTTCCAGTACCTATAGCGATTGCAGCCATAACTATTTATGTGTCATTGTAGCCATTGTTATTACTAC
ATGCTTCACATACCTCTACTGAGGTCTAAAGAATTAGTGGACTTCATATTCTGGAGAGAACACTTGAAGA
ACCAAACAGAAGTTTGATGTGAATCTGCATATCCACCATTATTGTTCATAGGTTCTCAGGATTAGTTGAG
TGATGCCTTAAAGAAAGAAAGTCAGATGATAGGTCTTCCTGCTGCCCGCACCACATCATGAGTGTTATTC
CTATAGAGGAGGAGTAAAGAGTGGGAAGAAAATGAAATCTGTCAATACTGTGAATATATAAATAATAAAA
GTAGCAGTAGGACTGATTAATTCTGAATCATCTTTATGAAATGACTGGAGCCGTGAAAATGCTCAGTCTG
CACAGCTGATTGAGAAATGTATGCAATCTGTTGATCGGAATTTATTTGTGAATGCTCTCTTCCAGAGATT
TATATACCAGAGTTCTTAAAACGAATTTTGTCCCCATGAAAAGAAAACTACAGATCTGTAAGACTGCAAT
TTAAAATGGAAGAAAACATGTTCCCACTTGAAGAACAACTTTCAAACAAACAACTGATACAAAAAAGTCA
AAAGCTGTTTTGTTTTATATAATAGTTTCAGAATACTTCCAGTCAATATATACCTTGGTTTGGTGAAAAA
ATAAAAAGCTAAATCCTTAGATCATTAACTAGAAATTTTTGTAAAATAAATAAAAGCCGTGGGTTTTAGT
GCAGTGATCCCATGAAGAGGAATATATTCACCATTGGTCTCTTAATCTCAGATAGAATGTACATGTTACT
TTATTTTATAACGAAAGCAACTGTGTTGTGATATTATGTATAATATTATAACAGGAGAAGTCCTCTTAGC
TAACTCAGTAATCAATAACATTGTACGTTGTGTGTTATTGTAACCAAAAACTATGACAGAACCCCATTTC
ATAAGATCAGTTTATCCACCTATATGATTTATATTTGAATATTCATTTCAGTACTTATGTTGCTTAAACA
AAGCTACTGTATTAGTCCATTTTCATACTGCTATAAAGAACTGCCCGAGACTGGGTAATTTCTAAAGGAA
AGAGGTTTAATTGACTCACAGTTCCACATGGCTGGGTAGGCCTCAGGAAACTTACAATCATGGCAGAAGG
TGAAGGGGAAGCAAGCATCTTCTTCACAAGGCCGCAGGAAGGAGAAGCGCCCAGCGAAGTAGGAAGAGCC
CCTTATAAAACCATCAGATCCCGCTATCATGAGAACAGCATGGGAGAAACTGCCCTTATGATTCCATTAC
CTCCACCTGGTCTCTCCCTTGACACGTGGGGATTATGGAGGTTATGGGGATTACAATTTAAGATGAGATT
GTGGGGTGGGGACACAGCCAAGCCATACCAAAAACTCTGTTTTTTGTTTTTGTTTAATGGAAATGATTTA
GAACTTTATTTTCTGATGTTTCTTTTTCATAAAACCACGACACCAAAATCTACTTTTCACTGCTCCATTC
AACTAGTAGAGAATATCTAATCTCTTCTCAAGTATTTCTTTCTCAATTATGGTGGTTTTAGCTAAGAACA
GCTTATGGCATGCTTTTCTAAATAATATTAGAACACATAAATTATCTGTACCTGGTATTACCACATTCAT
TGCTCATTTTAAGATCTCAATTGATACATTCAATTCATATATATTTAAAATTGATTCATTTAGAGCAAGA
GATACAGGCATTTTAATGTATTACACTGCTACTAAAGCTTAGCAAATTATTCTTTTTTGTGCCCACAAAT
TATCATCCATTCATGTCCTAAAAATAAAATTGAATTTATTATACTTTCCCATTTATCCAAAAAAAAGGTT
TTTTTTAACAATTGATGCAGATACACATTTTCAAGCTAAAAATATGTGTGAAAGTGGCCTCTTTCTCATA
GTATTTATTTTAGGAGTCTAGCAATAATTTTTCTTAGGTTATCAGCACATGTCTTAGCCTGAATTATTTG
AATTCAGTCTGTGTCTTCAAGTTCAGATGGTTATGTGATCTTGTTAAGATCTCAAAGTAGTGGGAATGAT
GGAGTATACAACAACCTCATTGTTTTTTATGGCAACTGTCATTTACTGAAGGACATAAGGCTAGCAGAAC
ATGGTCAGAGAAGGAATCAAAGTTTGGTCAGCCAACTCTGCTCCACAGCTACAAGCTGCTAGACAGGCAT
AAATTTTTCCAAACCTACACAAAGGGACTTAGGGCCCTTGGCTGAGAGCGACATTCTAACCACTTCCTTA
TTTATGGCTGGTGGGGTTTGTACATTTTCTCATTTCTGTATAACATTTCTTGACTGTAATAAGCAATGTA
TTCATTCTGCTTTACCACTTTCACTAACCTTAACCTCAATATATACTCAATTAAGCAATTGAAAACAGCA
GTTTTAATCTTTTGACATAAATGATTTCCTCCGAAGCAAAATGCTGGAAATCCCCTCAAATGCACCTTTT
ATTGATGAATACCTATAAGCACCACCTACAGTCGCTGGAGGCTGACAGGAACCAAACTTGATGATAACCA
CTGAGCTGAGAATTTTCAACTCACTCTTTTTCCCTGTATGGTTCTTCTAGCTGCATTATTTCCCACTATT
TAAAGCTACAGCTGGTGAACTATTCAAATATTTAAACTTTGGAGAAGAAAATATCAACTTATCACAACCC
TCTTTTTATATTCTAAATTCATATACCTGTTTGGTACTTAAAGGAAAAATATGCTGAGGAACAGGCTGGT
CATAAGACTGTATAGAACGTGCATCTTCCATCCTATTGAGGTGACTCCTAGACAATGGGAAAAATGCCTT
CACTCGACTTGCTCATTAAATGTGACCGTAGCTGCTAATCTTTTGGCGCTGTCTCGAACTTTAATTAGAT
GTGCTCTTCTCTTGAAGGTTGGAACTACAGTATCCAGAGACCATAGAATCACAGAGTTGAAAACAAAATC
TTGGAAATCATTGAATCCACTTATCAGATGAGAAAAAAAAAATAAGCCCATGGAGATAGCCATTTTAAAA
CATATCATTCTATTTAGCCTCCAATGTAAAACAATGAGTTACTATGTTTCAATAATGTTGATGTTAAGAA
ATTATTTGATAGCTTCCTCACTTGGTCTCCTATATTCCTCCAAGGTTACTAGTTAGGAAGACTGTCATTC
AAATTTGGAGACTACATAAGAAGCAGAAAAAGCATATAAAGAGGCACATGAAATTGGAACTTTTCTGGTA
AAATCTTCTTTCTTAAACTCTCCTCAAATAAGCTGTTGGTGGCAGGAGGTGAAAGACAGCCTCCACCCTT
TAGCACAGTCCGTACTTGTCAGCATTTCCCAGGAAGGGTGATGTCTGGAAATGATAGAGATTGTGGAAGC
ACATTGCATTATGGGTCAAGAATGCGAAGGTCAAGGAGTGGAGTCTTCCTTTACGAAGTAGTGTTAACTG
CTTGGCGTGGCATTGTTGTAAACAGAAGCCACCAGGAAGGATCATCCTTAGGAGGGAACCTGTAGATATG
ACTGAAAACAAGAGAGATCCAGTTTTACCACTCTGGAAACATAGGTAATAGAAAGCCCAAAAGGTACCTT
ATCACTTGTTTGTTCCTTTCTGTACAAAAGGACTTAAATCCTTTCTGAGCAAGAAAGATATTTGAGAATC
CAATTTTGTTTTAAACTTGAGCTTAGCATTTTGGAACTATTCCAAAGACCACAGAATTCACAGTCATTAG
CATACCACAGCAGACTCTTTTCAAATATTGCAAACCAGAACAGTCTGCTTGAAAACCTGGAAATACGACC
TAGTGGGTTCAACTTGACTTTTTTTATTTCTAACCCTTACCCCTAGGCAATTATTGATAACTCATTCTGG
TACCTGGTATGTATATGGACTTTGTTAGAAGAATTTGACAACTTTCTAATCATCTGTTTTTTTTCTTTTG
CTTGATAGACATACATTTAGTAGAACTTTACTGGATTGTATTGATTATAAACCACATTTCAGTTCATATC
AGTCCATTTTGCTGCACAATAAACAACCAAAAAAATTTAATTCAGTGGCTAATAACAACAATATTGATTT
ATTCATGGAGCTGCAGTTTGGTAGGGTTTGGCCAATCATGGCTGGAAATGGTTTAGCTATGCTTATCTCT
AGGCCGTCGGTTCTGTTCGGGTCTATACCACATATTTTCTTCTGAGACTCAAGCTGAAGGGACATCAGCT
ACTCGGGGTATGACAGAGTAGCACAAGGCAATGACAGAAGCACAAACAACACTTTTCAAAATCTCTCCTC
TTGTCACATTTGTTTATAGCCCATTAGACAAAACATGTCTTGTGGCCAAGCCCAAAGTCAAGGGGTAGGA
AAATACTTTCCACCTATGTGAGGCCATGGCTGGAGCGTGAATGTATGATACTACTAGGGATGTGAAAGGA
TTGAGGCCAATAATTCAATCTTCTATTGGAGACAAGCTCAACGAGTTAGTTAAAATGGAAGGCTAATATT
TACTAACTTTGCAACCCAAGGAAGAGAAAGCAGGATCTCTCTGACGATGACGGAATTTCATACCCTCATC
TTTGAAGTTATACTAAAGCTTAGGAACAACCGTCAGATAGGACTGAATTGCTCCCCCTTCCAGATTCAGC
ATGTGAAGTATGCAGCATCTTATTATAGCAGTAGCCAAAACAGCCGTTTTCTTCAATTTGGGAATACAAT
GTAGGTGTGTTAATTTTCAATTAAGAGTTCTAAACTTATTATCTGCTTGGTAGCTCTTCCATGTGACAGT
CATTCCATCTGACTCTTCATGTTGGCTTTTGAACTAAATTTTAAAGGAACCGCCAAAATTTAAGGGCCAT
GTACTTTTTATAACCTGTTTGTGGTCTGGGTAAGAAAATAAAAATTATACAACTGTTCTTTTTGACCAGC
CACAAGCATGTAATGAAAATGACTGTTTTGGCTAGCAGATGTATTAGAAGCTTTCAAGGTGTTTAAAAAA
AAAAAAAAAAACTGGAGAAAGGAGCCAGTGAATTGACCTCAAACAAAACAAGAACAAATAAACAAAACAC
TTGTCTGCACTTCCAAGGAAGGGTGATATCTAGAAAAGATAGAGATGATGGAAGCACCTTGCATTATGGG
TCACAAACGTGAAGGTCAAGGGGTGGCGTCTTCCTTTATGAAGTAGTATTAACTGCTTGGCAGGGCATTG
TTGTAAAAAGAATCCACCAGAAGTGAAACAAGCAGCACTAAAAGTTAAAAGATTTATGTGTAAACCTCAT
CTAAGGCAACAGAAGCCATTTCTATAAAATAGTATAGGACCTTTTATTATATATGGTCCTAGAGTATATT
AAAATAAGTCTGTTTGGGTCCATTTGCAGCTCATTTGAAGATTTTTATAGGAAAAACATCCTCAAAAATA
TCATACTACAGTGCCTTGATGCTTTTTTCTTTTTATAAGGTACTGCCAGCCCAAATAGTAAGAAACCGAT
ATGATTTTTGTCCATGTGAGGTGTTTAATTGCTTCCCAAAATATGGTTATTGTGTAGATGTCACTAACGA
AATATATAAAGAGCAGTATTTGGGAAAATTTATTTTAATACCACCTTTTTCCTTTTTTACCCTAAAAGTA
TTTATTTTTTTCGTAGCATACACTCTGTGTCTCAGTATCATTGTTTTTCATAAAAACATAAATTCTTAAC
AGAAAATTTCCTGCAAGCTCCCCTAAGCTTGAAGAGACAAAGGAGATTTGTAATGTAGCTCAGCCCCAAT
CAGGGTAAAAGAATGCAGGGCTGACTTTATACTTATAACTCAGAAAAAGGTTATGCTTCCCGTCTCTTCA
CAGAGCTAGTCTCTTAATTGATTCCGAACTAGGAACATGTACAAGTGGCCCACGATCTGGAACAGACTGG
CGGATAATGGAATATTGAGACCTTGTCTATGGTCAGCCATATTAACACTGGATAAGTCTGATAACACTGT
GATTACATATGTATCAATATAGTATGCTGTTAATATATTAAAAACTTATTTACAACATGATTATTGGACA
ACTGTTACAGTACAGCCACATCAATCCTATATCAAGTTAGACCATGTCAACTGGTTTTGTGTTGAGACAC
CTGTGTATGGACATAGTCTGAACTTTTCATAGTTTGTGCTAAATGATAGCAATCAACATCGGTATGGCAC
TTACAGTTTACTGATAACTTTCATGCCCATTAACATAGTACCGCAATAACTCTGTGAAGTGCTGAATTTG
TGTCCTGTTTCATGATTGTATTTGTGTTGATATCTCAGTCAGTCAGAGTCCCAACAAGAAACAGATGGCA
CATTCAGATTAGGGTAAGTTGAGGAGTCTTTATTTACAAGGCACTACATACTCAGGATTGGGCAGGGTGT
AGGGAAATCTCACAAGATAGCACAAGACTCTAGGACTAGCAGCAGCAGAGCTGTCACCTCTCCTAGACCT
GAAGCCGTTGTTGGGGAGAGAGGTTTCTCAGAGCCCAGAAAAAAAGAAAAAAAAAAAAAACATCATGCAG
ATTTTAATGCCTTGGGAGGAGCAGTGGCTTTCTCTTAAGGACAGAATTTGCCTCGAAATGATACTCAGGG
AAAAAGAGATGAAGGGAATCAATACTCTGACCCAAGACTCTCCCTTCTCTGCAGTGGTTTGCTAGTCCTC
TCCTTGGTCAAACCCAAACAGAAAACCATAGGGCATAGGAGTCTAATGATGTAATCCAAGTCAGCCCCCT
GGAAGGTGGAAAAAGAAGGGAAAATGGATCTGGATCTGGAGGGATACCAAAAAAAAAAAAAAAAAAAAAA
AACCATAGTTGGCATGCTTGTTTATTGATATTTTCTTGCATGATATAAGAATCCAGATAAATATAGTAAG
AGGTCTATTTTACTAACAATTTTAGGCACCTAATAATAATACTCCTTCTTTGAATGTATAACCTCTAGAA
TTGGTTCAGAAATGTAACTGTGCCGTTACAATTTCTATTAGTATTCAACAGTAGATTCATATCCATTCAT
CTATGACTGGAGTATCTGCCATTTGCTGGTTAGTTACTGTGTAAGGTACTTTGTAAGGTATAGAAATACA
CTTGGGGTGCGATGGCTCATGCCTGTAATCCCAAGGATTTGGGAAGCTGAGGCAGGCAGATCACTTGAGT
CCAGGAGTTTGAGATCAGCCTGGGCAACATGGTGAAACCCCATCTCTACAAAAAATGCAAAAAGAGTACC
TGCGCATGGTGGCATGTGCCTGTAGTCCCAGCTACTCGGGAGCCTGAGGTAGAAGGATCACGTGAACCCA
GGAAGTCGAGGCTGCAGTGAGCCATAATGGCACAACTGCACTCCAGCCTGGATGACAGAGTGAGACCCTA
TCAAAAAAAAATAAGAAATAAATTTGAGCTCAGTGACCTACATTCTAGTGCAGAAAAAAATGACCATAGT
TGATTATGAGATTTTAAAGCAATAAACCACATGAGACATACTAATGAGCTCATAAGATCATTCAGAAATT
GTTTATTATGAACACATAGTACTTTCAGTGTGGCATTAAACAGAGATCACTGTCCTTAAACAAGTTAAAA
GCAGAATCAAATCATCTGCAAATTAACACACCACTAAACTTTAAGCTTCTTGAGTGATTCTGTAATTTTT
AAAATGTCTTCAGCATTTCAGTGTCAAGATAGTGCAAACTCAGTAAAAGCTTGTGGAATTGCATTAAACA
AAACCAAAATAAATAGATTTTATTAAAACTATATACAATTGTCTTTCTAATCATATCCTCTCCATGAATA
GGGAAGAAATAATTTTAGGAATTTAAATATCTTCTATCTTAATAGTTCCTCTTATTTCCCTCTTAAGCAA
TGTTCACTCCTTCAAAAATATTTATTGAGCATCTAATATGTACTTAACACTGTGCCAGGTGCTGTGAAGA
ATGCCAAGGAAATAGAATGAACTTCTAATTCTTTGGAGTTCCAATTAAATAACCTAAAGTTAAATTGGTT
TCGGAGAGAACATTATGCCTTCGAGACTGTAGGCTTCTCTTGATTAGAAAGTCTTAAACATTTTAAGTAA
CTAAACAGATTAAGGAGAATTCAAGGATGCCTCTCACTAGTAAATTTGGATTAGTCTGGCAAACTTCAGA
CCTTAAATGCAAGATTTTTAATAATTAAAAGAAGAGAGAAAATGATAATTACATTTCTAGAGTCTATGTT
TACCATTCAGCCTTCTTAATCATTTCCTAAGTATATCTGGTGATCAGGATTTTATAACTCCAGAAAATCT
TTCTATACATCGCATAAATCTCTTCTTTTAAAAAGCTCTTCAATTTTGTATTTTGTTAAAACTTAAAAGC
CTCCATGAAAAATGAGACAAAAGTCAGTGAGAGGCTGTAGCAATAAAAATCAGATGTGATTTTCTTTTGA
ATAACATCTGTTTTTACAGTCCTTTCATGTTAAACTTTATAAGAATTTATTATAAACAGCTTTATTGACA
GTTCAATCCTATTTCTAAAAGGATTTATTTTCCCCCAATGGTAAGAGTTTTCTTTTCTTAAACCTAACTA
GTTGCAGATATTTCAGATACTACATTTCTCATTGTGTAAGGTAAAGTTTCTGACCACCTGAATATGACTT
GTAGCTCCTGAGAACAATTTGTTTAGTACCGATATCATGCAGTGACATTGGTACAAAGGAATTTTCTTTA
TTTCACTGTACTGTTTTCAGTTTTATTCTATAGTTGTTAAATAAGACCATTAAATATTTTTATTAGTCTT
ATTTCCTGTTTAACTAGGTGGGTTTTTGATCTCTGTTCAGTAAAGCATTGTGCTCTTCAGAGCAAGCAAT
TGAAAAGCAAATAGTGAGTATTTCTACTGTAAAAGTTTAACATTAAAAGATATACACACAGCCAGGCAAG
GTGGCTCACGACTGTAATCCCAGCAATTTGGGAGGCTAAGGCAGGAGAATCGCTTGAGCCCAGGAGTTCG
AGACCAGTCTGGGAACCATAGCAAGACTCCGTCTCTACCAAAAAAATTTTTTAAAAAATAGTTGGATGTG
GTGGAACACCTCTGTAATCCCAGCTACTCAGGACGCTGAGGCAGGAGGATTGCTTGAGCCTGGGAGGTCA
AGGCTGCAAGGCTGCAGGGAGCTGTGACTATGCTACTGTACTCCAGTCTAGGTGACAGAATGAGACCCTC
TCTCTCTCAATTAAAAAAAAAAAAACAAGATACACACACATATATTTGCGTAGGTAACTCTAATTTCATT
TCAAGTATGTTATGTAACAACCATTTGTGTAGTGCTTGTAACAGTCAATATGTAAATACTGACTCATCTT
CTTTGACAATTCTACCTAGATACTTATTAGAGTCCCCCTTAGTCATTGAAAGGAAGGTTAAAATCAAAAG
ACGTTGTTTGCCAAAGTAATGAAAGAAAACTTATAAACACAATGTATCATGTCTGGGGCTGAACTAAAAC
CCTTCTGATATGTGGTATTAACAGATCATCTTTCATGACAGTACCAGTTATTAGAAATAAAATGATTGGA
GTTATTATTAATACTAACAATAGTGGTATTCTTAAAATGACTTCCTTATTTATCTTCACCTTTATACATT
CTACTACTGCTTCAAGACCCATCTTGAATTCTTCTTCCACAGAACATTCTGCATTAATTTCAGCCAACAT
TGATTTCTCTTTTTAAAATTTGTCTTGCACAGTGAATTAGAAAACCAGGAATTGGAAAACCAGAAAAGCT
TATTAAGTAAGAAGCAGAGAGGAGAGAGTTTCAACAAAGGGCCATTCTAAAGTGGTCTACTGCGGACACC
ATACTGATTATAGTTGGTGATTAAATCTTATCTTTCCAACTGATTATAAACTCCTCCAGGGCATACTCTT
ATATTCCACAAGATGCTTATCTGGGTGCAGAGCATGCATGCAGTTGGTATTTGCTGATTTATCAACTAAC
TAAATCTTAACATATTATTATTAACAATTTAAAATAAAGTTAAATGTATCACTCTCCACCCCTCAAAGCC
ATTTCTGTTCTTTGTTTTCATAGCACCATTATTATTTCCTGCATAGTATTTTTTAAAAACCGTATTTTTA
AAATTTATATATTTGTTTATTTGGGTATACTTCACTAGATTGTAAGCGTCACAAAAGCAGAACTATTATA
ACCCCAGCCACTAACACAATGCCTAACAAATAGTAGGTTCTCAATATTTGTTGAATGAATGACCTACAGA
TATTACTTCATTATGAAAGATTTTGCTAAGTTGTTTTACATCTATTTTATCCAAAACTAAAGTTCTTGAG
GCAAAGCCTAGAATATCTTCTATGTTCTCACAATGCTCTGAATCAGTGCTTCTCTTAATATGCATAGCAA
TTGCCTGGAGAGCTTGTTAAAACATAGATTACTTAGCCCCAACCCCAGAGATGCTGATTCAGTAGGTCCC
AGGTGATGCTGCTGCTGTCAGTCTCTGGCGCACACTTTGAGTAGTAGGGCTCTAGGATGTTATATGTACA
GACACATGCTGAATAGTGGGCTATGTGCTTACTTGCTGGCTAAATAATAAATGTTCTCACTGAGTCATAG
AACTTTGAAATTTGCAAGGACTTTTGCTATTATCTAGTCTATGGATAGCAAATAACCTGATACCGTGCTA
TAGTGCTTGACTGCATTTAACCTGCAGAATCCTCATGAGCAGCCCAGCACCATCACTCCAAGTGAAACTA
CTCTCTTCTTGAGGTTGTCCAATTCTATCAATTAAAGATGAAAACCAGGTTCTGAGAGTTGAAATCTCTG
GACTTCAAAGGTCCAACAGCCCAGGTCTTCTCAATTCTCGTTAGTGTTTCAGCAGCTGAATACAAATTTA
TTAAGCTGTATCAGAGTAGTATCTGTCAAATTGGAGTGTCCATAATATGCTTAAACAGAGAACTCCATTC
CAATAACATGAACTTTCCTTATGCTTTATTCATCATCGCTTGAAATTTTGAATTTTGCCCAAAGAAGTTT
ATACCAGTACATGTTAAATTACATCATAGCCTTCTTTGTATAAATCTTAGAGTAGTTTACTGAAGTACAT
CGCAAAGTTTTGTTGTTTCTTAGGTGATTTTAATTATGTATGTTTACTTTCAGTAATGCATCTTTTCTCC
TTCATCAATATTATGTTATGCTAGCTGTAAGTACAAAATAATTGAGAACAAATTATGACAAATTGAACCA
AGCCACAAAAAAAGGAGAAACCAAATACTTTTGTGATTTGAGCTTTTTTCAGTCCTTGAAACTTTAAGAA
TATCTGTCTTTATTAACTTTTGCTTTTTGCTGATGGTTTCTCTCATTTTATTATAGCTTATAGCATTGTA
AATTAATTTAACATGAAAGGATAAAAACGTTGCTTTTGAAATGTTTCTCATTAAATTATGAAAAAATATT
ACACTAAATAAAAGAAAGGAATGCCTCTGGTACCAGCTTCTGTTTGCTCAATTATTGCAGTACCCAAAGT
GAATTATTACACAGTTAACTCAGAGGCAATATTATTGTCATTATATTATAAAATAGATGAGTTGCAATCT
TCAAAAAAAAAAAACAGCATAGGTCCTTTGAAAGTGAAATACCTTTTTTCCTTGTGCTTCATTTAAATAT
ATACTGACCCCAGTTTTGTTTTTGTTTTTCCTTTTTAGAGTTCTTGCTAATGATGGGCCCAAAGTTATAT
TAAGAACTGCAAAGTAAATTTCAACCAATTACTTTATTCAGGGGAGTCATTAAATTGAGGTACCTCTGAA
ATTTTGGAAGGAATGTACTGCCAATTAGCCGAAAGCACTACTCAATGTCCTTTCTATGGTTATAATCTCT
CTAGTGTATTTTTAATTGAAGACAACCTCTATAGAGGAGGTGAGAAGTTGCTATTTATTGGTACTTGTTA
GGATGGAATCAAGGGTGTGGAAGATATTCATCTATTTCTCTCTCCAGCTCCCCCACACAAAAAGAATGGT
GCTTAATCCATCTGAAGCATTTGGGGAGCGAGGGTAAAGATGTAATATTTACCATGAGCCGAAACAGATC
TTCAGAAGTGGAAAATGGAAGCATATTGAAGTCCCTCAACTAAACAGACTTTCTTCCATATGGAATTCAA
TGCATTAATGTTTTCAAATTCTATAGCTTCAAATTCTTAATATTTTCAAATTATGTGAGCTTATGTCAAA
ACATTTAAGTGAGCTTTTAACAATGAGGCAAATATTTGAATCATTTGTCTACATAACAAATACTACTATA
AAGCATATTAAATGTTATAAAAATCCTAATATACTAATGTAAGCTATTATAAAGTACAAATAATTAAACA
ATATTTATATGATCAATGTTTTATAATACGATAAACACATTAAATAATTAAAAACTCTTCCACCGTGCAA
AAATGACTAAATAAATTGTTAATTTCTAAGGCTTTTTGAGATTACTGTGAAAGGGGGTATAGTTTCAGGA
AAGGTGAAACTTCCCTTCAATGTGTAAACCATTAAAGAACATAATAACCTACTGAGTGTGGGTCTCAATG
ATATGCCCTGGAAAGTATGGGCAACTACTCCACACCCAATTTTGTCTTTATATGATAAGGCACAGCAAAT
AATTATAATGCAATGGATAAATGGTAAATCCCACCAAAGATTAACCAATCAGAGCAGGATGAAAATTCTG
AGTTTGGAAATCTATTGGAAGATTTACAGATTAGATTAAAGTGCCCAGTAACCAAACTATCAAAATTATA
TGGCTTCAGTTAATTAATGATTTCCAAGGTTTTTAGTATACTGTATTACAAAACACATTAAGCATCTTAA
GCATTCAAACAACATTTTTTTGATGATTCAGAAAGCATCACAAATTGTTATATCAGCTGATAATAACTTA
GGTACATATCAATTAAACTTGTATTATAGACACGCAGAATTCTTCAGACCAGAAGTCGAAAGGGCTTCTC
TAGTTTGTTTATGCTAAGTTGTTTAGAGATGACATAACTCTGAGCTAATTTGTCTATTGCAATGGTTCTC
AAAATGGGGGGGGGGGGATATTTTTACCTCCACCAAGTGGACATTTAGCAATATCTGGAGGCATTTTTAA
TTATTATTACTGGATTGGAGATACAACTGAAGTCTAGTGGGTAGAGGCCAGATATGGTATAAAATATCCT
ACAATGCATAGGATAGCCCTCCACAAGGAATTATTTAGGCCAAAATGTCAGTAGTATAAAAATTGAGAAA
TGCTAGTCTAATATAGTGTTTACTCACCTTTCCTGAAACTATGTCCCCTTTCACAGTAATCTCAAAAAGC
TTTAGAAATTAAAAAATCGTTTAGTCATTTTTGCATGGTGGAAGAGCTTTTAATTATTTAGTGTGTTTTA
TCTTATGAAATGTTGATAATATAAATATTGTTTAATTATTTGAACTTTATAAGAGCTTATATTAGTATAT
TAATTAGGATTTTATTTAACATTTAATATGCTTTACAATAATATTCATTATATAGACAAACGTTTTATTT
TTTTCACTTTAACAATGATTTTTAACTCTAATTACATAAGAAAAAGTATGAGTTAACAATTTTTTAAATT
ACATGCTTGGTTTGAGGGCCAAATACACATGAAAATGTGGACTAAAATTTAAAATCAAATAAAATCTATA
AAGTCGAGGAAAAAGCTACTTTTATGACGAGGCATGGGGAATTCTTCATAGTTTTTGGGTTTTATCAGAA
GTTAGCTATTTTTTTTCTTTTTGCTCTGTAAACAATCAGATAAGAGAGGCTCAAATGACATTTTCAAGTA
CATCTTAACAAAATACACTTTGAGCATCAATTGAGTAAAGTTTCATTCTTTTGAAACTTTGGTTTTCACA
AGATTTCCTGAGAGTTTTATTTTATTGGTGTTCTGTGGGACTTGGGCATCATAATTCTTACAAACTACTC
AGCTCAATCTAATGTGCAGCGAAGCTCTGGGAACTTTTGTTTTGTCTAGTATCCAGTTGGAAGATTCTAT
AGCTACAGAGCTTGGGTTTAAACCCCCTCCAAGTCTTTACCAGCTACCTTTATGACCCTGGCAAATTACT
TAAACTGTGTGCCACCATTTTCTCCTCTGTAATACGGAGGCAATAAAAATTTCCACTTTTAGATTTTCTA
TATGCGGTTTACAAATTGACTTACTCTGAAGATCATCTGGAGTAAAATCTGGAGAAATATGATCCCTTAT
AACTTCTTCAACCCTTTATATATTTCAACATGAGTAACCAATGCTCTAAATATGGATATAAATTATAAGA
ATAAAAAATCTAGGACTATTATAATGGTCTAAACTCTCTTCATAGCTAAAAGTGTTGAGTAATTAAACCA
GTTGAGCAGCTAAATCATGTACACACTTCTTTGATCCCTCCCACGATCATGTATTTGGCATTGTAATGAA
AAGATATGTTTATTTTCGAGAATAGACATAACTACCTTTAATAATATGATCACCCAGAAATTTTTACAAA
CCCCTGGAAAATTTCATGAATATCAGGCTGTGCTCATAAAACCTTAGAGATGAGATCACAATAGACTGGG
TCAACATATAGTAATGAGCAGGATTAATAAAACCTCAGATGGGCATTTACAAATGAGTCAAAACCATGAG
TATAATTAAATAATTGTAGCAAAAAAAGAGCCTTGGGTAATCCTTTCAGCAAACGTAATCGAAGTGATTG
CATTTAGAAGACAAATATTTAATTTGGTGACTAGAAGGTCTTTTATTATTCCATTATGTCTTTGTGTGTG
TGTGTGTGTGAGACACTTTTCAAGGTCAATTTTTACTTATAAATTGTCTCTAATTAAAAATTGACTTGGT
TATTAAATCATTGAAAATTGGCCATCATCAAATTCCTCATTAAAATATTTCTATGTGCCATATATATATA
TATATATATATAGAATATATATGTAGAATATATGTATACATTTATTTTTACTTTTTTTTTACTGTGCCTA
CTAGAGAAATTTAAACTACATATATGTAGAATATATGTATGTTTTAACTAGACATACTGTTAAGTACACT
ATACCTAATATTTGGCAATATTAATACCATCTCATTGAGAAACCTGGAATATATGCACATTTTGGATGTC
TATTATATGTTGGGCACTGGACTAGTCATTGATAATACAGAGATTAGTAAGACTCAGGTTGACTTCAGCC
ATGTTGTCAGGAAGCACACACTCTAGTTTGGGACAGCGAGGAGAAATTCAATAAGAGAAATATATATAAG
GCATAATGCTCTAGGAGAATATGCAGTGGATAACTGCCCAATAGGACCAGGCAAGGCTTTTTAGAGGAGG
AGGTGGCATTTGAGTCAAGTGTTAAAGGCTGAATGGAAATTCACTGGTTGAGATAAACTCCTTAGGAGGA
ACTACTTTAATAGAACTTGCCGTTAGTCCTGAAATAAATGGTGTGCAAAATCATTACCATCTGTCAATTC
ACTCAGTCTACTTTGCTCTTAACTTCAGAAAAAAATCAGAAATACAATTAAAACATTTGAGCCTATTTTA
CTGTCTTTTAAAATGAGTTAATTCAAAGAGGAAATTAAATATAATGAGAGAGAATCTCCCCCGAGGATTG
GGGGCTGGGGAAATGCTATTGATTCTTTGCTTGTGTTTATTTTCTCTCAAAAATACATTATGCATAAACT
TGATGATCAAAAATTCAGATTATTACATTTCTAAATTGGCAATGCAATTTATTGCATCATACATCAATCA
CAAAAATGCTCATCTTGCTGACTTTCATAAACTTCTAAATGAACAAAAATGCAAAAATAGTTTATACTAT
ATTACACTATAGTAGATTTGTTAAACTAAACCAGAACAATGGTCCATGAAAAATAGGCCTCTGACTCCAA
ACGCTCACACCACAGGATCTCTCTGAGATTTTTGTGTCATTTCAAGTCAGAGAAAATTGTCTAATAAATT
GTTGGCTTGTAACAATGAAAACTAAGATATCTGTGGGGCTATTCTTGTTCTCTTCATTTTACTACAGCAG
CTCTGCCCAGTAGAAATAAAATGTGAGCCACATATGTAATTTAAATTTCTCTAGTAGGCACACTGAAAAA
ATAAAAATAAAGAAGTGAAATTAATTTCAACAGTATGTTGTATATAACCCAATATACCCAAAACATTGTC
ATTTTAACATGTAATTGTTACAAAAGTTATTAATTAGATTTTTTCCGTTAAGTATTTAAAATCTGGTAAG
TTTTACTCTTACAGCGCAACTCAGTTCAGATCAGCCACATTTCAAGTGCTCAGTAGCCATATGTGTCTAG
TGGTTACCATATTAGAAAGTAGTTTGAGAGATCCACATTAAACCAAAAGGAAAAGAACTTCCGGCCCTTC
ACTGATGAGTCACTCTTCACTGCTAACCTTGGAAGCATTCCCAAATGTAGTCTACAGAGTTTAAATAGTC
TATCTTAACATCTCTCAGGGCTTCAGTCTTAATGCCATAGTATTTTTAAAGAATGGTGGATATTCTTTTT
TACAGAACACTCTGTAAGAGCAATTAGAAGTTTATGATGCACGTAATGCAAAATACAGGTCATTTCCCAA
GCCTATTTTAAAAGCGCAAAAACTGTAGTCATTTATCACCCCTGAGAATGTTGTCTTAAATGTCTTGGTT
TGGATATTGGTGATGTGAGAACTTTGTGATAAGAAAGTAGTCTTTAAGAATAAGATATCAGACTAAAATT
CATATCTAGAATGAAAGTCTTGTTTTTAATGGAAGATTAAGAGCAAGTCTGATTCAGATCATGCATGGGG
TACACTAGTCTAGGAAAACACTAGTCTGAAAATATACTAAAAGTTACTTCGCAACTTAACAAGAAAATGT
CTTGTGGGTGATGTCGTTCTTGATTTTTAGGCAAACCTACCTACCTTTGCAAAGCAGCTGGGACCTTTTT
GCATTGGAAGAATCATTTGGAGCACAAACAAAATTAGATTATCAACACTTTGGAAAACAACTACGAATGA
GCAATCAGAAACCTGACCTTAAGATTACTTGTGAATTGTGAATCAGCAAAATAAACTCGATTGTTCATTG
CTAAGTGTATTTCAATTATCAAGGGCCTTCTAGATTATAAGTAGTCTTTTTTTTTTACTTAGTTTACAAT
TAAGATGTGTGGTATTTGAAATACATTTGCCACAGGGAGAAATATAAATTATAATTAATTTCCTAGGCTA
ATTCAATTTATGACATACCTATATACATTATCTGTCATCTATAATTTTTCCCTTATTGTTTACTTCCCAC
TGGAAGAATGAAAATGGAATATTATTACATGGCACATGGCTTGATACTTTTACAAACTCTGACAATTATG
TATTTATTTTGGGAGGCATTGAGTTTATTTGTTTTATTTATATAAATTTATGAGGTACAAGTATAATTTT
GTTACATGCATAGATTGTGTAATGGTCACGTCAGGCCTTTTAGGGTATCCATCACCTTAATAAGATGCAT
TGTACCCATTAAGTAATTTCTCACTCTCATAAAATTCTAATTATGTGAATTTAATTTAATCTATTTAATG
TGTTTTAGGCAAATATAGCCGGTACTATAAACAGTTGATTTTAAGATATCATTGCTTACATTGAGACTAA
GTAAAACAAAATGGGTCAATAAATGTCAATCTAGATAACAATGTCAACTAAATAAGAGGTCAAACATGGC
AGTATTTTTGAAGGTGATCTGTGAAAGTGATTATAGCGTTTACACTCATGGAAAATGCCTTCAGAGTTTC
AACTAAGAATGCCAACAGCTCATTCCTTTATCCTGATGCATATTGTCTTCCTTCTCACCCCCAGTTCCTT
CTTCCCCTAACCCCTACCCGCTTTCCTTTGCTGATTTTGACAGAAATAGGACCCCCAATAAGTCAGGGAG
ATAGCAGGAAATGGGATAGGATAGAACCCGGAATGATAGAATAGCTGAGCCTGAAGGCATGAAGAAAGGC
TCCTCCTGACATCTAAATGGAGACCTAAGAGATGGGTTGGTCAGGTAGGGGGAAGGAAACATGAGGAGTA
TTCTCTAAGCCAGGCAACATACTGTGCACAAGTCTGAAGTCATGGGAAAGTGATTTTGAGAGGATTGCTG
CTTGGTAAACCTAGAGTTTGAATTGGGAGAGATGAAGCTAGAAAGTTAGTAAGGGTCAGATTTTTTTTTT
TTTTACTTGCATGACAATGGTAAAAACCACTAAAGGTTCTGTGTTAAGCAGAGGAGTGACTTCATTTAAA
AAGGTAAATTGGATTGAAATGAAGGGCATAAACTGAGGCAAAAATATCCTTCGTTAAGTTATTGAAGCCC
AGTTGAACACACTGGTGGCTTAAACTGGAGTATTGGTATAAGTGGGGGAAAGAGGTTAATAGATTCCAAG
TTGAAAAAAAAAAAAAAAAACATAGACTTTGCTATCTAGTAATGGATTAATATACAAAAGGAAAAAGTAA
AGTTTCTACTTTTTGGACAGCTAGAAACCTTCACCGAAGTAGGGAACCCAAGACTTAGATTATGTTGGGA
GGGGCAGGGTATTTTAGTTGCACAGGGATTTGCTTTACAGAAATGACTGAATGACAATATAGAGAGATCA
ATTCCATTAAAAGAAGTTTGATTACTCACAGTTCTCAAGGGAAGAGTACATACTACGCCATGCAAAGCCA
TGCAGGAAAAAAGTTCCAGAGTCGGTCAGCAGGCAGAAAAGGAAAGCACAGCCCAAACCCTTTATTGTGG
TTTCCAAGGAAAAGAAATGAGTGAGGTAGAATAGGCAAGTCTGAGCAAGTTTAGGACTGGATAGTTCAAA
TAATTTCCAAAATTTCCTGGCTGTAAAAGTGGTCTCTGGTTGTCTGGTACCAAGCCCTAGGGTGAGGGGA
AAAAGTTAGGGTGGGGGAAATATTGGTTTGGTGTAACAACAGTTAGATGAAGAAGGTAGTTGGGGATACG
GACTTTGGATTAGTTGGTTTGTATAACGAAAAGCAATCCAACAAATCCACAAGGGAGCAAGTTTACAAGT
TATTTGCTATCTTTAGGAATTAGCTAGCCCTGGGAGGGGCAGTCTCTCCCTGGCCTTCCAAGGACCTCAA
GATGTTCAAGCATCCATAAAATATGGAAATTTTTTAAAAACATTATAAATACACAGAGTAAACGCTGGGC
ATGATATAGGACAGTGGTTCTCAAACTTTAGCTCCACTGGAATCTCCTGGAAAACTTGTTAATATGCAGA
TGACCGTTTTACCCTTAAGCTTCTAATTGGGGAGGTCTGGGGAGGGCACAGATAATTTGCATTTCTACAA
AGTTCTTCCATGATTTTGATGCCGCTGGTGAGGGACCAGGCTTTGAGAACACTGATTTAGGACGTGTCCT
GTTTAGGGAATATCCAAAAGGCGGACAAGTTCAGGGAATATTCTTGGGCAGTTGGCTGTGTGAGTCTGAA
ATTCAGGATAGAATATTAAGCTGAAATAAAGATTTGGGAGCTTATCTACAGTCAAATGATAATTGAAATA
CTGAGAGTACGGGGGGAGAGAGGTCCATGTACCAAGAAAAGTGAAAATGACTAATCCCAAGCCTCGCTGA
CCATTGAGAATGGAGCTAAGTGAGAGGAGTTAACAAAGCTGACCCAGAAAAAGTCATAAGGGCCTTAGGA
GGCCAAGGAAAAAAAATACATTCACTGCCAACGAGAGGCACTTACGAATGGCTTGACTGGCTTTGCCAGC
ATGCATGAACTGCTTCATAATTATTTGTATTGATTACAGTAACAGATACATATTTTAACAAGCAACTTAA
GTAATACAACTGATTTTTAATTATCTTGTTTAAATTGATAAAGGTTGTATATATTCATGGTGTACAACAT
GATGTTTTGATATACCCATACATTGTGGAATGGCTAAATCAAGCCAATTATCGTATGCATTACCTCACAT
ACACTTTATTTGTGGTGAGAACACTTAGAGTATACTCTTAGCAAGTATCAAGTATATAATACATTGCTGT
TAACTATAGTATCCATGTTGTACAATAGGTCTCTTGAACATACTCCTCCTGTCTAATTGAAATTGTGTTT
CCTTCGAACAACTGATTTTTTTAAATAAAAAACTTAATACCTGTAAGTTAGAATTCTTAATGGTCACCTT
AGGAGCCTATACAATTATTCCTACGTTGTTGTTACTATTCTGTGTCTTTTTCTTTTTTAACATCTTTAAA
GGTATCAAATTTTTATATTTTGAAAGTAGAATTTATTTTTTGTCAGTCTAAAATATTTTTATGTTGAACA
AAATGCATGAATGGTAAACCTAGATGCAATCAATTTTTCAAATAAAAAAAGTAGATACCCATGAACATTT
CTTTTGTAATTGCAAACTGTCTTGAAAGGCAGTTTCAAAAAGAGTTTAGTTCCTAAATTGTACCATTACT
CACTGCGTTAAAATGCAACATTCATTTGAGCGTATAACCTTTTGATCAATTTGTTTTTGATGTCTTGTTC
CCTGAGAGTTGTCTCAAATAGATACATATAAATATACACATATCTCAGATTGGCTCTGAGAAATGTCTTG
ATTCAAACGTTCTTGATTCTAAGATTCATGGTACATAGGAACTGTATGGTGACAACCTTGTCAGCCTATC
TTTAGAGTAGCTTTGGATTCTATTCAGAACATTTCCCAAAGCTATTCTGCTATCAAGAATATAAACAGGA
ATAGTCAAGGGAAGCTTTTTAAAGGGCAACATTTTCATGTAGGCATTTTTCTCACATTGAAAACTAGTTT
ACTAAATGCAGTGTATTACCTTCTCATTACAAGAAGTCTTTCACATTAGTATAAATGCATATGGCAGTTG
TGCCAGAAATAAATTGCCTCTCAAACTAGCACATGGAAAGAAGAATTCTGAGATTTAGCACATATGTAGC
TTTTAAATAGTATACTCTGTTTCAAACATTATGTGTTAGTCCACGTTCTCTTCAGCCATTTTCAGTTGCA
TTTTTACTTTATATTCCTTTGTATATTTATCTTTGCTAATCATTGTCCTGAGATTCCTTTAGCTCTTGAA
TTCTACGTTTTTAATTAATAGAAAACTTTCTTTTTATTTTTCCCCCGACATAGTTGTTTTCTAGAAAGAA
ACAGTTATAGGTTATAAATCCAACACTTTAGGGCCGACTTGAACATGCATCAAAGCTACTAGAGGACTTG
TAGAAATACAGATTGAATGGTCCCATGCCTAGAGTTTTACATTCAGTTACAGATAGGGTAGGACCTGAGA
ATTCACATTGCTCACAAATTTCCAGTTGATTTTGATGGCATTGGTCTAGAGACCAAACCCTGAGAACCAT
TAAAAAACAAACAAACAAAAACAAACAAACCAAAAAAAAAACTATATACAGAGATTTTCTTCATTGGCTT
TTGCCACTGAAGACATTTAGATGAAGAGACTCCACAAAGTGTAATCATTTAGTTATGAGAGGGGCCTGAT
AATTTGCATTTCTATCAAATTCCCAGGGGATACTATTGTTGCTGATTGAGAACCACACTTGGTGAAACAC
TAATTAAAATACCATTAAAAAGCAAAAACAATTTAGGCCAGCAAAACCTCCTAAAGAATGAGGCCTAAAG
ACTTATTTTGTTTTATTTTTGCCAGAAGCTTCTTATGGGCAAAATTATCACCAACAGAGCTGAGGTTCAA
ACTTGTGTTCATAGCAAGCAAAAGGGATAATTTGGAAAAAAAGCTGAGGTTAGCTTTGTGGTTGGTTTGG
GAGTGGGAATGAGTAGGGAGGAAGAAATTTAAAAAAAAAAAAAAAAGGAAGAAGCCAAATATTAAATTGT
TCACAGGGCGAAAAAAGAGAAAAGGAGTAACTAGAAATATCTTAGACTGGTTCGGCAAGTCGGGTCCCTC
GCAGCTAACAGTGGTCCCACCCTCTGGAGTTTATATGTTTACATTCTTTTTTTTTTTTTTTTTTTTTTTG
AGACAGGGTCTCACTCTGTTGCCTAGGCTGGAGTGCAATGGTATGATCACAGCTCACTGCAACCTCCACC
TCCTGGGCTCGGGTGATCCCCCCAACCTCAGCCTCCCAAGTAGCAGAGACTACAGGCAAGTGCCACCATG
TCCAGCTAATTTTTTGTATTTTTTTGCAGAGATGGGGTTTCACCAGTTGCCTAGGCTGGTCTCAATCTCC
TAGGCTCAAGTGATCTGCCCACCTCAGCCTCCCAAAGTGCTGGGATTACAGGTGTGAGCCACCGCGCCTC
ATTGGAGTTTGCATTCTAGTTGGGAAAATAGCCAATAAATTTGTGACTTATTTTCCTTTAAAAAAAAAAC
TTATTCTGGCTATTGTGTGACTATAGGATATGGAAGGTGCAAGAGTATGAGGCTAACACCCTGTTCTAAA
TTCCGTCTCCTCTGAGCCTTGTTCTGTCAAGAATCTCCTCCTTCTATACTTTTTAAGTCACCTTCCTACT
GATCCTTTGCTGTCAGCTTACCACTCTGGTACCCTTCATTTTAACAAACAAACAATTGTCCAAGCTTACC
GGTGCTGCTCCTTCACCCCTCCACCTGTACCTAGTGTCAATTCTCTCCCTCTTCTGATGGCCAAACTTTG
TGAAACTGTAGCACAGCTCCATATGTGTTCCTGCAAAGGACATGATCTCATTCCTTTTTATGGCTGCAGA
GTATTCCACAGTGTATATGTACCACATTTTCTTTATCCAGTCTATCACTGATGGGCATTTGGGTTGATTC
CATGTCTTTGCTATTGTGAATAGTGCTGCAGTGAACATACGTGTGCATGTATCTTTAAAATAGAATGGTT
TATATTCCTTTGGGTATATAACCAATAATGGGATTGCTGGGTCAAATGGTATTTCTGGTTCTAGATCTTT
GAGGAGCTGGAAGCCATTATCCTCAGCAAACTAACACAGGAACAGAAAAGCAAATATCACATGTTCTCAC
TTAAAAGTGGGAGCTGAACAATGAGAACACATGGACTCATGGAGGGGAACAACACACACTGAGGCCTGTC
GGGGGGTGGGGCGAGGGGAGGGAGAGCATTGGGAAAAATAGCTAATGCATGCTGGGCTTAATATCTAGGT
GATGGGCAATAGCAAAGACTTGGAACCAACCCAAATGTCCAACAATGATAGACTGGATTGAGAAAATGTG
GCACATATACACCATGGAATACTATGCAGCCATAAAAAAGGATGAGTTCATGTCCTTTGTAGGGACATGG
ATGAAGCTGGAAACCATCATTCTCAGCAAACTATGGCAAGGACAAAAAACCAAACACCACATGTTCTCAC
TCACAGGTGGGAATTGAACAATGAGAACACATGGACACAGGAAGGGGAACATCACACACCAGGGCCTGTT
GTGGGGTCGGGGGAGGGGGGAGGGATAGCATTTGGAGATACACCTAATGTTAACTGACGAGTTACTGGGT
GCAGCACACCAACATGGCACATGTATACATATGTAACTAACCTTCACGTTGTGCATATGGACCCTAAAAC
TTAAAGTATAATAATAAAATATATATATATATATCTCTAGGTGATGGGTTAATAGGTGCAGCAAACCACC
ATGGCACATGTTTACCTATGTAACAAACCTGCACATCCTGCACATGTACCACGGAACTTAAAATAAAAAT
TAATCATAGAACTTTAAAAAAAGAAAAGAAAATGTAGCAGAGCTGCCTAGCTCACCTTCTTTACCCACAG
CTCACTTTTCAGTCCATTTATCTGGCTATTACTCCTACCGTGCCAGGCAAACTGCTCTCACTAAGAAAAT
CAATAGCCTACCCCCTGCCAAATTGCCTGACTCAGCTTCTCCTTGTAATTTTCTCCTTTAGTTCTCTAAC
ACCCTCTTCCCCAGGTTTTCACCTGACCTGTCTCCATAGGACATTTGAGTCTCTTTCCTGATGATTCATC
CTCAGCCTCTTCCATAATAAGTATGGCTGCTCCCCAGATCCTACCCTCAGCACTTCTTCACTTTCCATGC
CACATCTCTTCTGTGATCTCATCTTCATCCACGGCTCTAATTAGTATCTATAAGCAGATGACTCTCAAAG
CATATGCTGCCTATGTACCCCTCTTGGCCATTCTACATTGACATCTGCAACTCCCCAGTGAACTTCTATA
TTTAGACCACAGGACTGGTACCTGCTGATAAGCACAGGTAGGGTGTACTGAGTAGTGTTTTCTCTATTTG
GTTGGGCTTTTGCTAAAGCAGTTGTCAAATATTTTGAGTCTTACTCATGGCCACAGACATTTTAACATTA
GCATGTCCCAAACTGAAATCCCCTACTGCCTCTATTCTCTATTTCAGAAGATGGCACCACCATCTACCCA
ATTATTTAAGCTAGAAACTTCTGATTCTGGTGAGACTTCTCTCTTTTATGCATATGTCTACACTGACACA
AAAGACTGCAAATTTTACCTCCTAAGTCTGTCTTAAAGCAGATTTTTCTCTATGATTCTCTATGGTTTCA
GGCCCTTATCACTGTGAAGTCAAGCATACCTGATTCGAATCTTGTCACCGTTGGCAAATTTTTAAATCTC
TTCTAGCCTCAGTTTCCTCATAAAGTTTTCTGTTTCTTAGGGTGACTAAAGGGCTTAAATGAGATTACCA
TACAGAGAGTAAGGTACATAAAATGCAATTAATAAAGAATAGTCACTATAACTGCTGATGATGATGCTAT
TACTATTCGTATCCTAGAAAACTCCGGTAACTTGTTCACTGGTCTTTCTGCATCTAGCATCACTTCCTCA
GCCAGAGTTATCTTCTGACATGAAGGCTGATGCCGTCACCCCCATACTCATGTTTGAAATTCTTCAATAC
CTTTAAGATAAATTCCCACCTCCTTGGTGTAGCATGCAAGGTCACACATGACATAATCTCTCCAAGGCCC
CATTTCTTCCACTCTCCTTGAGTGATATATGTGGCAGAAAATTTAAGGCTGCCTGGATATTATCCACCTT
ACGTCCCAATACTTCCATCTGCCGCAAAGACCTTCTACCCAACTTCCCATCCTCAACGAATTCTTATTCT
TTCTTTAAAAATAACCTCAAACTTCAGACTAGACCTCTGGTCCATAGGGCATTACAAATCTCTCAGTAAG
TTGTACAGGATGAACACGCCCCCTAAAACTTTGTTTCAGATATTTCAATTTTTATTTTATTTTATTATTA
TTATACTTTAAGTTTTAGGGTACATGTGCACAATGTGCAGGTTAGTTACATATGTATACATGTGCCAGAT
ATTTCAGTGTTAAAGGTTTAATAATCACATTTACAGAAAAGGAATTAGCTACAAAATGGTGGCACTGGTA
TACAAGTATGTAAAGATACAGTGCTTACAATTTAGGATTATTGTTGTCGATGTTTTAATATTAAAATGGC
TAATCATACAGCAAAGTCGAAAGAAATTTACGGTCAACATCTGTATACCCAGCACCTATACTTTGCCATT
GAAATTTTACTATACTTGATTTATTACATATTCATCTATCCATCCCTCTTTCTGTGATCAATTTTTAATA
TTCTAATACTCTTACCCTTAAATAATAAGTTATCTTTTCAAAAAATAATGTGTTTTTACATAGATGAAGC
AAAATAAACTTGCCCTTGATAAAACAATATGCACTGTAGTGCCTTCTAATTCAGTGCATTGAAGTATCCA
TTAACAATATAACCAGAGAATATAAAACATGTTTATTAATATTCCACTGTACCTGATTAGATATAGACCA
TTAGGAAGAGTTATTATAATTAAGAATCTAGGTTTGTCAATATAGAAAAAAACCTGTGTTTTTTATCCCA
CTGGAATGTCTTGTGAGGAATATTGTTCCCCTTTTTCTAAAATTTAACTTTGACCTTTATTTTGTTAATG
CACCATGGGTTAAGCCACACTACGACATGTGCTAAATAGACCTGGAAGTTTTCAAACTAGGTTTTTAAAG
TGTATTTGACATTAAATCTTCATAACACCTTATTGATTAATTTAAATCCATTACCATGGTAAGGAAAATT
CGCAGACAGGCAGGTGAAAATTAAAATAGAAACAAAACAACATGGTAAGCAATCCTTCCCCCCAAGCCAA
TCAGCATGTAGTCAGTGTGTCCTTTTAAATTAGCAAGGCGCAGCTTCCCATAAAGTCCCAGCTTGATTTT
ATATGCTGCAATAGTATTGCTAAAATAAAGGAGAAGGCAACTTTTCTCTATAATTTTTTTCTAGAAGTTT
TCACGCAGCTTAGTATACTGCAATGACCACATTACTCAGTTCCAGAATTAGCAGCATTCCATTGTGAATG
ACTTAATTCACATTGTGATTACTCATTTAACAACATTCTTGAGGGTTTACAATGTGCAAAGCATTACATT
AAGTCGTGTGTGGCAGAGGTTCTCAAATGCAGATGATCTGTGAAGAAGATTTCCTCAATAAGCAGAGAAA
TGAGAACTATAAGGACAGAAAGAGAGAGAGAGAGAAAGAGAAATTATTTAAGCTTGTAGCTTGTCATCCT
CCTTTCTTAGGACAGCCTACCATTTAGGCTGAGACTATGTCTTTCTGATTATTTCTTGTGGTTGAAATAC
CCCTTCCTTAACAATATGATGGTAACAGTGGATGGTAAATCTTGTTTTGTTTTAATAGTTTACCTGGCAA
AAGTATCATTTTATGTCTGTATCAGTTATATATAATAGTATATCAGTCCATTACCAAACCGCCTCAAAAC
TCAGTAGCTTAAAACAGTAGGTACTTCTTGAGTTCACTAATTTGTGGGCTGATGGTTTACATTGGGTAGT
TTATCTGCTCTGACTGGGCTCCCTTGGGAATCTGGAGGGTAGCTGAGAGCTTAAGTGTCTGAAAGTGGCT
GGGTCAACACAGCTCTATCGCTCACATCTTGAACATCCCTCCAGCAGGCTAACCAGCCCGAGCAAGTCCT
TTTTGTGAAGGCTGAGGTGAAGAGTGGAAGTGCAAACATGTAAACAATTTGTTGAGCCCCTGCTTCCATT
AAGCCTGCAATATCCGATTGGCTAAAGCAAGTTTTATTTCCCCCTGTGGTAGGCAGAATCATGGGCCCCT
CGAAGATGTTAATCCCCAGAACCTGTGAATATGCTGTGCTCCCTGGCAGTAGGGAATTAATATTCCAGAC
GGAATTAAGGTTGCTAAGCAGGTGACTTTGAGATGGGGAGATTTTATGGACTATTCAGATGGGCCTAATC
TAACCACAGGGTTCATATAAGTGAAAATGGAAGCAGGAGAGTGGGAGTCAGAGAGATGAAGATAGCCCCT
GCTGGCTTTGAAGATAGAGAAAGGGGCCATTAGCCAAACAATGTTGGTAGCATCTAATGCTGGAAAAGGC
AGGGAAATAGATTGTCCTCTAAGCTTCTTCAGAAGGAGTATAGCCCTGCCAACACTTTCATTTTAATCCA
TGAAACCCATTTCAAACTTCTGACTTCCAAAACTATAAGATAATCAATTTGTGTTGTTTTAGGCCAGTAA
GTTTATGGAAAATTGTCACAGAAGCAATAGGAAACAAATATACGCTCCATTGTTCAATCTTTTGAATAAC
ACATATACTATTATTTACTTAATGTTTTTCTTAAAATCAGCTCATTTTGTTTTCTGCTTTTAGCCTTAAG
TGATAATTCCCACAAAACTGTAGTCTGATGTTGCAGTGTTTTTTTCCTTAATACAGATAAAACTAAATGA
ATATTAAAATTTAAACTATAAGCTGTTTATCTGTGTAACATGGTAAATTGGCTCCCTACCACTACTGTTC
AGCAAACCACATTTTGGGAAACAGCGATTTAGGTGGTTCAAAGGAGCAAGTGATTGTGCAAGAACAAGAA
TTTATTAGAGAAAGAAGCATTTGGCCAATGGGTAGAATTGTTGGCAGACAAAGGTAGAAGAGAAAGACAA
ATTATTCAGTATGGCTCTAGCGAACTCTTTGCACTTTTATCACACAATCTGAAGCTTGCTAATCTTGACA
TGTCTTAATGTTGTTGGATTGCTCATTAAACTGGCTGAAATGTTCACAAAGACTCTCACCTGTCTTCTGG
CTTAAGCTGAGATTTATCACACTTCTTGGAAACATCTTCTGGTCTCCAGATCTCCCTCAGCTAAGCTATA
CAGTCAGTCTGTTCTGTAAGAAAGCCCAAACTTCTCTGCAGTGTTCCTCAGTCTTTTTGATATCATGATG
AACAGATTAAGTTGATGTGTTCATCATGATATCAGGTAAGCTGGCCGAAGACTCTAAGCTGCCTAACCAT
CCCAGGGCTGAGAGGGATCGATATCTGAAGTACCTATAACCCAATCAGGGCATGTGCCTTAGCATACCCA
TTGGAAAGCCCTGTTTTAGAGCCTTTATCAGCTGTGAACTTATTGAAGGCAATGATTTTGTCCTGTTAAT
CATTCTATTCATAATTTTCAACAAGATACGTGGTTGTTGTTAATAATAATTGTTGGTTGAAATGAAGTTA
AATAAATAGCAATTGACTTTTCCAAGGTGACGCATTGCACAGATTTATTTATCTTCCCTTTGCTGCCCTG
GAGTACCAGTTGTATCTACCAATAAGCTTCATTTATAGGCCAGCCTCATCTTAGTTTCTGAATTAGTCTA
AGTGGCTCTGGTAGCGCATCAAAAATCTTGCTTTCTGATGGTCTTTGTAATTTGAATTCTGTGACTTACA
GACTTGGTATTCAATATGTCAGGAATAAACCTGGGGTGTGCCCAAATGGTTTGAAAAATCCCAGCCTTCC
TGATTTCCTCTCTTCTCTTTCTCCCCTGGCCACCCTAATAGTCTGATAGTTTTTGTTATTTGGATACTCC
TAAACTCTTGGCAATTTTTCTTACATCTGTTCTCTACAGGCTGTCACAAGTGAGTGGAGGCAGGATGGCA
TGGGCTGCAGTGGAAAGACCAAGAAAATAAGTTAAAAGCCCTGGGTTCCAGTAAATGCTCTGTAGTGGGA
TTTAGGGCAAGTCTCTTAACTTCTCTCAGCATCAATCTCCGCATCTGTGAAATAAGATTAATGACACCTG
TCTTGCCTATACTTCAAGGTTGTTTTGAGGTTCACATGCATTTTCCACCCCATATAGCCTATAAATCTCT
GATGCCTACAGATAACCTATAATGTTCTCCAGTAAGTTTAATATTTCCAGGATTTTAAAACTCAATGACT
AGCACTGCTCTGATCTAACATAACATATTGTGTCAATATGTGTGGGAGTCTCTCTGGTTGATGTTAATGG
AAGTTTGTATAGTTTACCTAAAATAGAATAAAGCTATAATATTAATATATATCATCGATGTGTTTTAGGT
GATTTTTTTCAATATAAAGGCAATTTTGGTTCAAAATTAGGTAGAACATTTAATTTTTACTAATTTACAA
ATAAAATGATAACATCAAAAGGGCCCCTTCTTTTAAAGATAAGTTGTAACTCTCACATTGATAGTAATCT
GTCATTTAGGACAGGGAATCCATGTAGTTTGAAAATTCATTGGCATCATGGAGCTAAAACAGTGGCTTTT
TAAACATGTCGATTTCAGTTTTCTTTGTTTTACAAGTCAAGTAGTGATATTACTGGGTACATATGAAGCA
TACTGATTGACCAAAAAATAGTAACAAATTTTGTAAACCCTTCACTTAACCATTATTCACCTTTCCCAGC
CACATAAGAATCCTTTCTCTTTGTCCTTAGATTAATTGCCTTTCTTTAACCTTTTCAATTCTAAGTCCAG
ACAAGCTGCTGTGGTTCTTTAAAAGGCCACACAAAATAAGTATTGTCCAGTGCTAACACTCTGAAATGTG
ATATTGTAATTACTACCAAGTGAACATTAATCACTACTAGATTAGAATGGAATTACCTGTTATATTCACA
TTAATAGCAAATGAGCTTTCCCTGATTGATGTTGTTATAATGAATACAAAAGGAATTAATAGTGATCTGG
CACTCACCAAAAGAGGGGTAGTCATTAAGGACATGCCATCAAAAGGCGGGTAATACTTTACAAAAAACAA
GTATTAATTAAAGTAATATCACAACGAATGCCTATTGAATAACTTATATCCACATTACAAAGATATTATA
TGGTTGCGATTAATGTGATTGCAATACATTTTGTAAAAATTAATAATGACTAACCCTTTAAAATATTTAG
GAAGCAGATATTTGTTTATATTTGCTAAATAGCTATGCCAACTCTTTAGCTTTTGTGAGTGACTTCTAGC
ATAGGAACAGTGATGGATAATATGAAGCACTATATATAATAACTCATCGGCCGGGCGCGGTGGCTCACGC
CTGTAATCCCAGCACTTTGGGAGGCCGAGGCGGGCGGATCACGAGGTCAGGAGATCGACACCATCCTGGC
TAACACGGTGAAACCCTGTCTCTACTAAAAACACAAAAAATTAGCCGGGCGTGGTGGTGGGCGCCTGTAG
TCCCACTACTCAGGAGGCAGAGCTTGCAGTGAGCCAAGATTGCACCACTGCACTCCAGCCTGGGTGACAG
AGTGAGACTCTGTCAAAAAAAAACAACCTCATATATTTTTACTTGAAAACATACATTTTGCCTTTAGGAT
TTTTACTTGTTAGAATATCCTAAAGGACCTATAATTGTAAATGTAAAATTGACTAATTTCTGGGTTTTAA
AAAAAAGTATTTGAAAGCTGATCTGCTGTGAACATTGAACCAGATGTTAAGAAAAATGCTAGTAAGAAAT
GAGACTTGGGAGCAAAGAAGCAGAACTAAACTTTTCATATATGGTTTCTATGGAGTAATTGAGAACGTAC
ATATTAACAGGGATACAAAGTCAGGCCCTCTCATTCAAGATGCTTTCTGTCTTTAAAAAAAAAAAAAAGT
AATTTTTGAAATTTTCTGTGGCAACAGTCCCATAGCAGAAAGCAAAGAGTTTTGAATTAAGTGATCAGAA
TATCATTCTTATAATTTTACTACACTGAACATTATTTAGAAAATTTTGAATGATATTAAAACCGCTATAA
AACATACTTGCCTACCATAAGACTTAGGATTTAAGCCAGATTAAAATAAATATTTATTTAGAAGGATGTA
TGTAAGAACTGGTGAAATATAAATGAGGTCTGTATTTGAGTTAATAGTATTGTGCCAATGTCAGTTTCCT
AGCTTTGATGATAATGTACTATGGGTATTTAAAATGCTATCATTGGGAGAAGCTGGGTAAAAGGTGCGTG
AGAAGTCTCTGTACTATATTTGCAAGTTTTGTGGTCTTAAACCATTTCAAAGTAAAGTTATTTTAGAAAA
TATCTAAATATATATTTTAGAAAGTATTATCTTTTTCTCTGTAACTAGTGGCTAATTAGCTCAGTCTGAA
AGAGTATGTAGAGGTGGAACTGCTAAATATATTTCTGATCTAGACTTACTTGATGATGCTTGAATTAGTA
AGTGAATGTTATGTGCCAACATATGCTATGATACATATAAATATATAAGATTAAATGATAGGAGCTAATT
ATTTCTTGGCATGTTGCAGTGGGTCCATTTAAAACTGTTTATGTAGGAAACTACTGTAATTATAAAAATG
AGCACAGCCCAACAGCCCAGTATATTAGTTGAAATATAAAAGGCGTTGTGTCCAAGATTTGAAATGCCTT
ACAATAAGCTTGGCACTTACTTACCTTCACACAAAGCAGACACATTTTATTGTGATTTTAGTGTTCCATA
TTATATGGTACAGTACCAAAGGAAAACTCTAAAATATGTACTCAAAATCCTGATGTGCCCTTCTTTCCAA
ACAGGTGGCACCACAATGAATATAACCTTTAGAGTTAATATCTGAGGACAAACCCAGCAGTTACACCAGC
ATGATTTAGGTCCTGCTGTTACAATTATTATTATTGTATTTATTTCACAATTAAGTTGCAGAGTTGAGCT
CGATATAGTTCCAGCTGTGGCTTTTTTTTCAACTGTCTCAATAGTTCATAGATATGGCCAAATGTTCAAT
AATAGTGAAAGCTTATAGTCCACATATTATTTCTGTAGCACCAATTTTATGTGAAAAAATGATTTATCTA
AATCTCAGAGAATTTCCATAACTAGTTTTGTTATACATCTACAAAACTAAGTTAAAAGAACAGAGCAGAC
TTTTTAAATAGCTAGATTGGCCAAATCCACCTCATTATCATCAAGAAGATACTGAAACACCGTGTTTATA
CAACAAGACCAGGCATTGTAAAAGAGGAGGAAAGGTAGAGACAAAATTTATTTAGCCCTCAGGAATCTTT
CATTCTGATAGTGTAAATTTGACAACTTTAGAGGGACTTATTAACATGTATCTTATATATCTTGATACCG
AATATATATTTTGTGATTGCATTAGAGCCATGAAATATTACACAGGTCATTTGAACATAGCATTTTCATA
GAGAAGGTGACATTTGCAAAAGATTAGGAGAAAAGTAACTACGATTAGAAAATCGTAGTTTTATTTTGTC
TCTTGAGAATGAATTGATGTTAATTTTATGTCTGATTTGGCCAAATACGATGTGGAATTTGCTAAAGACT
GAAAAAAGAAGAGACATCAAATAGAGGGTTGCAAGTTAACAGACCATGTTATAATTAAATGAGGGAAAAA
AAAGTAGAGTTGTTAAACTCCCAGAGAAGTCATTTCCCCTTGGTTTGGTGCATTTCACTTTGGTGGTGAA
GTAAATGACCATATGGGCACTTTTCTAGCTCTGTCCGCAGGTAGCACTGGGTATTTGTGGACAAATTACC
TAGCTTTTCATAGCACTAGTTTCCTTGTTGATAGACTTCAGAATTCTAAATTCCATTTTACATCCTTATT
TCTATGTTTAACTTAAAGATAATCCTTTGCAGCCGGGCACAGTGGCTCACACCTGTAATCCCAGCACTTT
GGGAGGCCGAGGCAGGCGGATCACGAGGTCAGGAGATCGAGACCATCCTGGCTAACATGGTGAAACCCCA
TCTCTACTGAAAATACAAAAAATCAGCCGGGTGTTGTGGTGGGCGCCTGTGGTCCCAGCTACTCAGGAGG
CTGAGGCAGGAGGATGGCATGAATCCGGGAGGTGGAGCTTGCGGTGAGCCGAGATCGAGTCACTGCACTC
CAGCCCGGGCAACAGAGCCAGACTCTGCCTCAAAAAAAAAAAAAAACAAAAAAAAAAACAAACAGATCAT
CCTTTGCACTGGAATTATCCTGCAGTGGAGGATAGTAATGAAAGTGTAGACTCTGTTTCTGAACACTAGC
TATGTCACTTTCAAACTGTGTGATTTTCCTTCAAGTTTCTCAATCACTCCAGGTCTGGTTTCTAAATAGA
GGAATAGGAGTAGAGATTAATATTGTGAAGATTAAATGAGAAAACTTATATAAAGCACTTAGTACGGTGC
CCTGCATATTGTGAAGGCTTGGTATGTTGTTAGTAGATTCATTTTATTATCATTATTAATAATACTGAAC
CCTGGCTGTTGGGGGAATTGGTTCTATCCTCCTGTCTCATAGTCAAAATAGGTTAAAGGGCCTTCTATCT
CTTATTTCTGGTGGTGCATTATAATTACTAATAGTAATGTGCTTCATTTGTATATGATCCTTTATAGTTT
ACATGGCGCTGTTTTATGTAATCTTACTAAAATTTCAAAAATAATTTTAAAAAGCCAGAATTCACAAGAA
TGTGACTCGGAGAAGAAGTAGATGTTTTTCTAAGTAGATCTTTCAGTTTAACTGATTCAAATTTTCTCAT
GTTTCATATACATGATTATCATGTCTTTTGATAAACAGAATGTTAACCAGAGTACAACCTTGTATGAACA
TATTTATTCAGCTTAGAAAAGATCCAGAGGTACAAAATCTAGATCCCAGTGTAGAAGTTAGCATACACAG
TACAATTTCTAGTATGTCCATAAACAATATGTTAAAGTATTAGTTTGAGCCATATAGGATTGCCAATATC
TGAGTGTTATAGAGCTACAAAATTAGTAGGAAATTTTGTTGCTTTAACCTAATCATTAAATTAGAATTGT
GTGACTTAAAGTTACAAATGGTTTCCGAATATTTTGCAGTAAAAAAGTAGTGAGGAAAATAAATATAAAT
ACTAAACTAGACCTGGGAAATTTAAGGCTATAAAGAATTCTAGCTTACAGAGAGAGGAGTCTTTGTTTGC
AACCTCCCACTAGCTAAATTTAAATTATCACAAATTTCATCCTCTCCTTTACTTAACCCTTGACTCATGC
AACTAGTCAAATGTCTTTTTCTTGCTAATTTTTTCTTTCCATAGATCACTTATAGGGAGTTCTGGTTAAA
AATGATGTCTCTTTAACCTTCACTAAAATGAGAATAGGGGAATTAAAATGATATTTACCACAAAGAGAAA
AAAATCTGGGAGGAAAAACAATAAAATAAAAAAGATAAAAAATTTAGGAATATGCAGAGAATGGAGGAGT
TAGCATATCTTGGAAACCTGAATTCCAAGTACTTAGAACTTGGGAAGTCCTAGAAATGTGAAGCACCAGC
TACTGCAGAAGGCAGAGATGAATGTGAGGTAAGATAGTGAGACTGTGAAGAGAAATCATTCAGTAAAAAA
TGCATTATCAAGCCAACTGCCACTGGTCTAGTGGAGTTTAATCCCACTGGGGAAATTCTAAATGGATTGA
AGACATGTGTTTAAGAGTTAGTTATTCTTTCAAAGGGGCAAGGGAGCTGGGGTATTTATACACAAAATCC
TGCTAGTCATTGGTTTAGGACTGCTTCCAACGGGGGAATTATTTTCCTAGCATTTCTGGCATACCACCTT
GGCAAGAAAAATTATTTTGTGTCCAGAGTATGTCTAAAGCCATTAGGGAAAAAAAATGTGGATCCTCATA
GTTGAAAGCCAGGCCAGTCTGCACTAAAGTGGTAAGGATGTTTTCTTTTAGAGATACAGGTCTAAGAAAG
AAATCTGAAGGTGGTTACCTCTTATGCAAGAATTTAATTTGATGGATTCAAGGTGTGTTGGTTAAGAGAA
ATGGGGAAGGGTTGCTTCTCATGACTGCGGCACGATTCTACTATACTAAATTTTTCTTTTATTAAGCAGC
ATTGCCTTATGCAATGATAGGAAACATTTGTTATATGTGAAATCACTTTTATTTTTATTTTTTAATCTAT
TCCTATTCTTTTCATTTTTTTAACTTTTATTTTAGGTTTGTGGGGTACATGTGAAGGTTTATTACATAGG
CAAACCGGTGTCACAGGGGTCCGTTTTACATTTTATTTCACCACCGAGGTATTAAGCCAACTACTCAGTA
GTTATCTTTTCTGCTCCTCTCTCTCCTCCCGGCATCTCTTTTAAAAGAAAATAATTTTTAGCAATTCTTT
AGAATAAGTCTTGGCCACCTAAAGGTTTCCAGGACTCTAGTTCAGGGAGTATTTATCTAAGTCAGTAGTT
CTTAACCTGATATAATTTCATCCCCAGAGAACATTTGACAGTATCTCAAGAAATTCTTGGTTGTCACATT
GGGGGGGGGATACTGCTGTCATCAAGTGGGCAGAGGCCAGGGATGCTGCTCAACATGTTGTAATGCACA
AGACAGCCCCCCACAACAAAGAATTATTTGGTCCAATATGTCAGTAGTGCCAAGTTTCAGACATCCTGCT
CTAAATCAGGACTGTGATGTGAATTCTCTGCGATGATGAAGATATTTTATATCCGTGATGTGCAGTACTG
TAGCATATGGCTACTGAGCAATTGAAATATAGCTAGTGTGACTGTACACCAGGTGTGATGTTCCATACCG
AGGAAAGAAGTAGAAATAAGATATAGTCTTTGAAGTCAGAGCTCACAATCTAGTAGCGGAGACAGATTTT
TAAAAATTACAATATTTTAAAAATATTGCAATAGAACATGGTAATGTTAGAAGATTAATAACATGCTAAA
TTTGAGGCATCAGGACTCAGACAGACAATTAAAAATTCTCTGAGGTGAATTTCCACCCTTAGCTCAGAAT
ACTGTAATGTTTAAAAGCTGTTTTCTATACACACACACACACACACACACACACACACACACACACACCC
CTTTAAATCTTTTATCATGTAACTCATTGCTTCTTATTTTACCCTTTTGTCAGAGAATACATATAAAATA
CTGGAATCTGATGGGACATTCTACTTTATTTAACAATGCTATTGAGTTTCTCAAAATAGTTTCCTAAGAA
AGTCTATTAAAGTATTGATTTTTTCATAAAGGATAATACAAATGGCATGAGTCTGTTTAACATTTTAATC
AAGCTTAAAATTAGTCTTGCATTTGAAACAAACTTGCCCAGAGAAATTGTTGAGAAACTTAAGAGAAAAA
CATCATAAAAAATTGATGGGCCAGCCAGGCTGTGAGAATATTAAAATCCAAATCTAAATTATGGTTAACC
ATTGTCACATCTTTCTTTGAAGCTTAAGTAACTCGATATTCCCTGTAGGATACCCAGTGATTCAAAGTGA
CACATATACTGTCAGCTCATTTTCCTTCCCAGCATGCTGGTACAATTTGTATCCATAGAAATATATGGAA
AAACCTATTAGTCTTGAGTGCCAGAACCTACCAAAAGGAATCTTTGTCATCTACAAATAAATTAATAACA
TAAGATAAACAATCCTATTAAGTTATACTGGCCCGAAAAGGGAAAAAAGACCAGTTTATGAATTGACAAA
AGAAGGTAAATGAGATTAGCCATATAGCAACCACTCAGATAATAATGTGTTTTCTCTGTTTAGTAAAAAA
GCATATTTGAGAGAAAATTTTCCCTTATAGAACAATTCTTAATAATATACATAGATACTCCTTTCCTGGG
ATGTAGAGTTTAATCCTCCCCTAAGCCCCTCCATGAACTTGGTAACTTACTTCCAGATAATAGAATATGG
AAAAGTAGGAATAACAATGGAGAAGAAACCAGGCAGGCACCAAGTTAACTAAGTAGTCAAGTATAACATC
GCCAGTGATAATAATATTGATATCATGTCTCCTGTGATATGATGTCATGAAAAGGACATGTTATCTCTCT
GGTATTCTTCCCCAAAACCTGTAACTTCTTCTAATAGGGAAAATACTTCAGTCAAATCTTAAGAGACTTC
TAGAATATACCTGACTAGTCCTATTCAAAAGTTTCAAGGTCATGAAGAACAAGAAGAAACTGAGAGACTG
TCACAGACTAGAGGAGACCAAAAAGACCCAAGGACCAAATGCAGTAGGAGATTCTGGATTGGATCCTGAA
ACAGAAAAATGACATGAGTGGAAAAACTGGTGAAATCTGAATAAAGTCTGTAGTTTTGTTAATAGTGTTG
TATCAGTGTTTGTTTAAATGTTTAGATAAATCTCTCATGCGTACAGAAGAGTTATCATTAGGGGAAGCTG
TGTGTCAGGCACTTAGAAAACTTTCAGATACATAGGTACCTTTTGTAAGTAAAATAATGAATTAATGGGT
CATTTTATGTCTGTATTTTATATAAGGCTACATTTCTAAAGAGACAAAATTGTGAGTCCCATAAAAATAT
AAAATGAATATGTGTAAAACATTTTATTAGATCATTAACTGATGAAGGAATTAGTAAGATGTTAGTTACA
GTTGGTTCAAAGGAGAGTCTGAAGAATTGGCATATATATATACGTATATATACGTATATATACGTATATA
CATATATATACGTATATACGTATATATACGTATATACATATATGTGTATATATATATTTTATATATATAC
ACATATATATATAAAAAACACTCTAGAATGCTGATAGGAATTTTATAACAGATACAATACTGATCACTAA
CTGTAGGGCAGGAATCTATTGCGTTCCATGAGAAAATTTTACTGGCATCTAGTGAACAAGAATCATTTGT
GTCACCATCAGCCCTCCACAAATTGACTTTTAAACGTACAGAATTGCAAAATAGCATAACCAAAGTCTAA
GGTACAGACTCTTAGATAATCAGATAACTCCTAAGGTTTTCCTAAGGAATTAAAGGGAAAGAGACATTCT
CAGATTAAGGAAAACAAAGAATTTCTTGCTAGCAAATCTGCTCTTAAAGAATGACAAAAAGACATTCTCT
AAACAGAAAGGAAATTATAACGAAGTCTTGACATTTCAGAAAGAAAATAGTAGAATGGGTAAAAATGAGA
GTAAAATAATAGACTATCCTATTTACCATAAGTTTGAAGTGAAAACTTTAACACCACCTGATGTGGTTCT
CAATGTATGTAGAGAAAATACTTAAGAGTTATATTTTAAAAGAAGACATACCTAAGTGGAAGTAAGAGTC
CTTCTACACGTCACCTGAAGTCAATTCCAGTAGATTGCAATGTTAATGCGTATCGTAATGCCTGGAAAGA
CCACTAAAAAACTATACAAAGTGATACGTTAAGAAAATACAACAAATAAATTTTGATGGAATCTTAAGAA
ATGTTCAAATAACCCACAAGAAGGTAAGAAAAAAGAAAGAGAAGAATGAGAAATAAAGAAAACAAACAGA
AACCAAATAAGGTGGCAGATTGAAGCCCTAATATATCCATAATTACCTTAAATGCAAATGGTCTAAATAT
ACCAATTAAAAGAGATTTAGCTGAGTGGATTGATAAAAGCTGAGCACACAATATGCCGTCTAAAAGAAGT
TTATTTCAAATACAACCTAGGTAGGTTAAAATTAAAAGAATCGAAAAAGTTACATTATGCAACAATTAAT
CAAAAGAAAGCAGCAGCAGTAATGTTAATATCAGATAAAGTAGGCTTCATTGCAAAGAAAATTACTAGTG
ACAAACAGGGACATTACATAAAGATTAAGTGTTAATTCACTGGGAAGACATAATAATCCTAAATGTGTTT
GCACCTAACAACAGAGCTTCCAAATACATGAAGCAAAAATGAATAGAGCTGAAAAAAGAAACAGACAAAT
CCATATTTCTAGTTAGGGACTTCAACACTCCTCTCTCTTCAGTTGATAGAACTACTAAATGGAAAATAAG
CAAGGGTAAAGAGAACTGAACAACACCATCAACCAATAGGATCTAATTGAAGCACTCCTCCCAACAGTAG
CAGAATACACATTACTTTAAAGCTCTCATGAAACATTCACTGATATAAGCCATATTCTGGACTCCAAGCA
ACTTCAGCAAATTTAGAGAATTCAACTTATATGTTCCCAGAACATAATGAAACCAAGCTAGAAATCAATA
AGAGAAAGACAAAAGAAAAACCTCAAAACACTTGGAAATGAAGCAGCACACCTTTAAATCATTTTCCCCA
GGTCAAGGAGGAGGTTGCAAAGAAAAATTTTTTAAACACAAAGAACTAAATAAAATGAAAATAAAACATC
AACATGAGTGAGATTCTGAAGCAAAGGGCAAGCATATCTACTGTCTATTTTTAAAGATTAAGCTTCCTTA
AGCTCAGGGTTTCTCTCCTGTGATGCAATCCACTGTGTGTACAGGTGTCTCCTGAACTTCTTTGGGATTA
CTCTGTGGGAACTGGCTCAATAAAATGTTGGTTCTTTGACTACTGCTTTGCTGTGAGTAATCTAGTCTTT
TTCTCTGGCAAAAAAAAATAAAGTGAGATGTCATAAAAGCAGTATTGAGAATAAAATGTATAGCATTAGA
TTATTTAGTTAGAAGACAGGAAAGGTCTAAAATAAATAAATGAGCCTAGAGACAAAAACCATCAACAAAA
TATTAAATAACATGCGTCAAAGTTTAAAAAAAGAGTGTCATACCATAACTAACTGGGATTTAGTATTGAA
GGCTGGCTCAACATTTGAAAGTTAATTAGTGTAATCTACCATATCAACAAACTAAAGAAGAAAAAATCAT
ATGATTATATTGATTGATGCAGAAGCATCTGACAACACCCAGCATCCATTCATGATAAAAACTATGAGAA
AACTGGGAATAGAGGATAACTTCCACATCTTAATAAAGGGTATCTACAGAAAACTACAGTTAATAGCATA
ATTTTAATAATGGAAGGCTTAATGTTTCCACCCATGATTGCTAATTAGGGAAGGATGCCCAATTTCACTA
CTCTTTTTTAACATAGTTCTGGAAGTTCCAGACACTACAATAAAGCAAGGAAAAACAATAAAGCATGCAT
ATTGAAAAGTATAAAATAAAATTATTTCTATTTGTGGATGGCATGACTGTGTACGTAGAAAATATCAAAT
ATTCTACAAAAACAAAAGCAAAAATAACCAAAAATGCTCATGGAGCTGAGAAGAGAGGTTAACAAGATCC
AAAAATACAAGATCAACACACCAAAGCTAGTCACATTTTTATATACAGATGCTCCTCATCTTATGATGGG
CTTACATTTAGATAAACCCATCATAAAGTCAAAAAATCATAAGGCAAGCCATCACAACTTACGGATTATC
TATGTTGGAAATGAAGATGTGAAAAGTGAAATTAAAAACACAACACCATTTATAATTGCTTATCCAAAAA
TGAAATACGTAGGTATAAATCTATCATACATGTACAGGATCGGTATGTAGAAAATTATAAAATGCTGATG
AAAGGCATTAAAAACAACCTAAATAAGTGGATTATATGGCATGTTTATAGACTGGAAGAGTCAGCATAGC
AAATATGTCAGTTCTTCTCAAATCAATCTAAAGGTTTAATTTAGTTTCTATCAAAATCTTATCAAGGATT
TCTGTACACATAGACAAGCATACTCTAAAATCTATAAGAAAAGTCACAGGCCACAGAATAACTAAAACAG
TCTTTTAAAAAGGTAAATAAAGTGGGAGTAACCTCTCTACCCAATATTATGGCTAACAATATAGTAAGGC
TATCAATACAGTATGATGTTGCTGGAGGGATAGACTCATAGACCAAATGAAACAGAATAGAGAACCCAAA
AACAGACCCATGCAAATGTGCCCAACAGATTTTTGATAAAGTTGCAAAAGCAATTCAATAGAGAAAGCTC
ACCTTTTCAACAAATGGTCCTGCAGAAATTGGACATCCCTAGAGTGGGAAAAAAAAAGAACTTCAACCTA
AATCTCACACCTTGTAAAAACTTAATTCAAAATAGATCATGGACTTAAATGTAAAACATAAAACTATCAA
AATTTAGGGAAAAATGAGAAAATCTTCAGGCTCTAGGGCTAGAATTGGCATTGAAAGCATGATCCACACA
CAGAAAAAAATCAGTTGGACTGCATCAAGATTTAAAACCTTTGCACTGCAAAAGACCTGTGAGGGAGGAT
GAAAAGACAAGCTACAGACTGATAGAAAATATTTTCAAGCCATATAGCCAAAAGATGGATGTCTAGAATA
TATAAAGAACTCTCAAAACTGCAAGGTAAAACAAGAAACAAACAATGCAATTAGGAAATGGGCAAGACAC
ATCAAGAAACGTTTCACCAAAAAGGATATACAGATAGCAAATAGGTGCATGAAAAGATTATCAAAAACAT
TAGCCATTAGAGAAATGCAAATTAAAATTATTATATATTCCTACACATCTATCAGAATGGCTAAAACAAA
GTAGTTACAACACCAGATGCTAGCAAGGATGTGGAGAAAATGGATCATTCACATATTGCTGGTGGAAATG
TAAAATGGTACAGCCACTGTAGCAAACTGTTTATCAATTTTCTGTAAAACTAAACATGCAGCTACCATAC
AACCCAGCAATTGCACTCTTGGACATTTATCTTACAACCTGTACAAAAATATTCATACCACCATTATTCA
TTATAGCCAAAAACTGGAAAGAACCCAGACGGTCAACAATGAATGGTTGTACAAACTACGGTACATCCAT
ACATACCAGGCAATACTATTCAGCAATAAAATGGAATGAAATATTTATACATGCAACAACTTTTAGATCA
ATCTCCACAGAATTATGCTGAGTAAAAACAGCTCATCTGAAAAGGTTACATAATGAATGATTCTGTTTAT
ATAGCCGTCTTGAAGTGACAGAATTAAAGAATGAAGAACAGATTGGTGATTGCAAGGAGTCCGGGACAAC
AGGGGAAAGAGAGAGAGAGAGATGGATGTGACTCCAAAAGGGCAACACAGGAGGCATCCTTGTAGTGTTG
GAACTGTTCTTTACCTTGATTGTGTCAATGTCAATATCCTGGTTATGATATTGTACTATATTTTTGCAAG
GTTTTACCTTCAGGGAGACGGGGTCAGGGGTATACTGGTTTTCTCTGTATTATTTCTCACAACTACATGT
GAACATACAATTATCTCAAAACTAAAAGTGTAATTTCAAAAAACAAATAAAACAATTCAGAAATTTTAAG
ACTTCAACAGTCATTTATCTCATTTGTTATTTTACTGTTGAGAAAACAGGCACAAAGAAACTGAAGTGAC
TTACTTTCATGCTTCACCTAAGTCTTTTTTTCTTTTCTCCATCACTCAGTTAAGAGCTTCTGTAATACAG
AAAGTATGTCTTGTATTCTTTTAACTCCCATATTACTTCAAGCAATGTTGAACACATGTTAACATTGTAA
AAGTTGTTGTCTGAGTAAATGGGAAAGATAGAGGTCTATGTCTATATGCAAATACTTTGTATTAACATGT
TTCAGTCTGATATAACTTTCCACACAGAAAGTACAAAAGAAGATCTGTTCAAGTTATCTGATTTAATTAA
GATAGTAAAAAGAAAGCTGATAATTTAGGGGGTCTTATTTGATTGTTTTTAATTTTACTTATTTTCCACT
AGGTGATCATTTTGATGATTCAAAAATGAAAATTTACAAAAAGGTATAAAATAAAAATTATTTCTCCTAC
CTCTATGCACTGTCGAATCAATTCCCCTACCCACCACCAATCAGTATTGTCAGCTGTTTGTATATCCTTC
AGGAGATATGTACGAATTTCAAGCGAATATGCATAAGTTTATGTTATGTATATGTGTGTGTCTGTTTTCT
ATATATATGCATCTTTACATTAATGGTAGCATACGATACACATTTTCTTCTGAATTATGCTTCTCTCTCA
ACAATGTTTCTTGGACATTTTCCTGTATCAGTACATAAAGAATGTATTTGTTTCCTATGACTGCAATAGT
GAAATACCACAAACTGGATGACTTAACCAAAAGAAGTCTGTTGTCTTACAGTTCTGGAGGATAGAAGTCT
GAGATCAAGGTGTCAGGAGGGTTGGTTCCTTCTGAGGGCTCGGAAGGAGAATCTGTTCCATTCCATTCCC
CTAGTTTCTGATGGTTTGTTGGCAATCTTTGGTGCTCCTTGTCCTGTAGATGTCTGCCTTCATTTTCACA
TGGCATGCCCCCTGTGTACGTGTCTGTCTCCAACTTCCCCTTTTAAGGACAGAGTCATATTGGACTCAGG
CCCAACCAAATGACCTCATTTTAAGTTGATTATCTCTGTAATGACCCTATCTCCAAATAGGGTCACATTC
TGAGGTACCAGGGGTTAGGACTTCAACATTTAAATTTGGAGAAAATTTGGACAGAATTCAACCCATAGCA
AAGAACTTAACCGTTAGTTTAATGACTACATATTGTTCCATTTTGTGGATGTATCATAATCTATTTAAGC
AGTGCTCTGAACATTTTATTGGTTTTCACTTTCATTGTTTTGCCTTAATATTGGTGTCTGTTTCATAGAA
TAGATTTATAGTATTTTAGGCTTATCAAGATTTTATTTAAATCTTGGAATTTAAATTCCCTGTAAATTTC
AAGTGCCTTGAAGGCAAGATATATTGAGGAGGGGAGACTTTTAAAGTTCATATGAAATAATAAATAATCG
CAAGTATCTCAGGAATGCATGAAAAATAATAAATGTCTCTGCATCAATAATAAGGGAGGGGGCTTGCCTT
ATCCAATATTAAACTTGCTGTAAAGCTACTGTAATCCAAATAGTATAGTATTAGCACAAAACAAGACAAG
TAGATCACTGAAGCAAAATTGAGAGTCCAGAAGCAGATCAGATTGTTTTTGGAGGCCGGGCATGGTGGCT
TACGCCTGTAATCCCAGCACTTTGGGAGTCTGAGGTGGGTGGATTACCTGAGGAGTTCAAGACCAGCCTA
GCCAACTTGGTGAAACCCCGTCTCTACTAAAAATACAAAAATTAGCTGGGCGTGGTGGTGGGCGCCTGTA
GTCCCAGCTACTTGGGAGGCTGAGGCAGGAGAATCGCTTGAACCCAGGAGGCGGAGGTTGCAGTGAGCCA
AGATCGCACCATTGTACTCCAGCCTGGGCAACAAGAGCGAAACTCCATCTCAAAAAATAAATAAATAAAT
AAATAAATAGATACAAATTGTTTTTGGAAACATTATATGGCAAATGTGTTATTTTAATTCAAGGAATAAA
GGTGTTTTATTCAATAAATGGTGCCAGCACTCTTTGCAATTCCTCTTAGAAAACACAGATTGCCTCCTAG
CTTATGCAATGTAAGAATACATTTCAAATGCATTAAAGTTTTAAATGTAAAAACAAAAATTCTTGGAATG
AGGAAGACGTTTTCTAAACAAGACACAAAACTCAAAAGCTATAAGGAAAAAATATACCTTGTTACTGCTT
AAAATAACAGAAGACAAAGTCAAAAGAAAAACAGCAAATAGAGTAGATGTATTCGCAACATGTGACATAA
AGAGATGCATATACCTAATATACAAATTTCTCCTACAAATTTGTTAATTAAATTAATATTTTTTAAAATT
CAAACAACCCAGTACAAAACTGGCCGAAGTATAGGAATATGCAATTCCCAGAAGAGGATATCCAGATAGC
TGGAAAAATAAAACTATGATAATATGCTTCCTCATAGTAGTAAGGGATAGGAAAATAAAGAAATAAGACA
CCATGTCTATCTAACAAATAGACAGAAATTAAGAATGATAATTTTTAATGGAAGAGAGCACTCTCAGATA
TTGCAGATGAAACGCAAATTGCTGTGGTCTTTGAGGAAAGAAATGTGGTATGATCTACAAAAATTTTAAA
TGCACTTACCTTTTGATCAGTCACTCCATTTCTGAGAATCAATACTACAGAAATAAAAGTACCAGTATGA
AAGGCTGTATGTAGAGGATGTGTATTTTGGCATTGTCTATGATGGTCAAAAAGTAGAAATCAAGCAAATA
CCCTTCAGTGTGGAAATTATTGAATATGTTATGGAATTATTTGGGCATCCCAGAATGAATTATTATTTAG
TCTAGTTAGAGCTGTGTCTACTGTCCTGAAAGAATGGTGATGATATCTTTCAAAAATCAAAACAAGTTTC
AATTAACATATTCCATTTTTAAAATAAAAAAGATAAAATTAATCTTATGGGATTACATAACCATGAAGGA
GGAATGGAGAGATATATACTAGGTTATCAGTATTTGTTACCTTGGATTTTCAAAGGAGAATGAAAGAGGA
ACAAATAATGTATCAAGTTTCACAAAAAGTGAAAAGGTGGAATATAAATATTACTGCAAATATATAACCA
TTGAATATGTATATGGACAAGGACGATAAGATAATATAGAAAACTGAATATGTTGGTTTTATTATGAGGT
GGTTGGATTGAAGATATTTTTGTCTCCAAATACTGTTGTTTTAATATGTTGTGTTTTACAAAGAAACATG
GGCTGAGCAGACAGGGAAGCCCTGATAAGCATAGTACCTGCCATGTGGCCATTCAATAAATGATAGTTAT
TGATTATTATTATTAGAGTTGTAGTACAGTAGTGCCTACCTTAATATATTTAGATTGATGCCCAGCAGCA
TTGAGTTAACCCGCATTTTAAGGACAAGTGTTATAGCTATTATATACTAATGGTAAACTTGAGTCTGTAA
CTAGCACTGTTGAAGGAGGACAACAGAGTAATATGATGTGTATTGGCCTGGGGATGGAAGGGTGGTGCTT
AAGGCACAGCAGATTTTCACTCCAGCCAGGTTTCCTTAGGACCTCTCCAATGAACAGGATACCTCCCTTC
CTGTTCTTTCTACCCTCCCACCCCGTTTTTTGCTTTTTCAGTTTCAGCCCAAAGGGGAAGGAAGTATGAT
GACTGACTCCCCATCAGTCCCTGAGGTGAACTGGGATTTTGGGAGAGTGTGGCAGCTGCAAATTTGGCTT
CCTGGAGATAGGATTTTTGCCCTCAATCTGGAGAAAGTTCCTGAGGCTACAGCTGTTCAAGCTTGTGAAG
TAGGAACTTTGATCCCTTTTTTCAAAAGTTTTGTATAATTAGCATCCAACTTGTTAGACAGTATGTGGCT
CATTACAAGATTGCCACAAATTCATGCTGGGCCGTGTCTAAGAACAGGGCAAAGGGAGCCTTTGGAAAGT
GTTATACAGTTGACCCTCAAACAATGTGAGGGTTAGGGGCGCTGAGCCCAACACATTGAAAAATCTAAGT
AGAACTTTTCACTCCCCCAAAACGTAACTACTAATAGGCTACTGTTGACAGAAGCCATACTGATAACATA
AAGAGTGATTAGCGTATACTTTGCATTGTTATATGTAATATATACTGTATTCTTGCAATAAAGTAAGTTA
GAGAAAATACGATGTTACTAAGAAAATCATAAGGAAGAGAAAAATATATTTACTATTAATTAAGTGGAAG
TGGATCATCATATAGGTCTTCATTCTCATTATCTTCACGTTAAGTAGGCTGAGGAGGTGGAGGGAGAGGA
GGGGTTGGTCTTGCTGCCAATCTAAATGCTGGGCCCAGCCAATGGGTATAAGTTTTAAGTGTGCACATAT
TGGTGAACCCTTACAGATCACGGCACTGTCTGTTCGAGTGTCTATTTTGAAATGTCCCTATCCGTAATAT
AAGTTGCAAAGGAGTTTGTGGGCCCACTGAATTCTACCACCCTGATCATTGTGAAGCCCATTCAGCTTTG
TGAAGAGCTTATCTTGGTACTACCTTAGCCAAGGTATGATAACTCAGACATAATGTCTTTTCTTTCATGG
TTCCTTTTTTAGTGATCATAGATTCAGTTCTGTAATAATTAGAGATTTATGTGTCCTATTAGTAATTGCA
TCATTCTTTAAAGACAGTGTCAACCTTGCTATACAGTGTGATTGAAGCCTTGACATAACTTGGGGGTTTG
TTGGCATTTTGAAATCCCAGGCCCCACTTCAAAACTGTTGAATCAGAATCTGCATTGTAAGAAGATCCCC
AAAAGATCTGCATGCACAAGCCTTGAAAGAGAAGAGAAGCCATCTAACATTCCTCACCTAAGATTTGAAG
AATTTCCCACTTATGCAAGAGTAGGGGTGTGATTTCTCAGGCAGGATATCTAACAGAAAACAACACTTAT
GAAGTGTTTCCTGTAGGAGCTAAGCAGGTGGCCAGAAAATGGCAGGCTACAAAGGAGAAGAATGACTAGG
AACCTGAGCAAGGAGAAAGTCTCAAAGACAAGGAAGTGGCTGGCAGTGTCAGGGACTACCAGGCAGCTGA
AAAAGCTAGGTGTGAACACTATTTCTTGGAGTTTTCAGCAAGTAAGAGGTTCATGATGATGCCTCAAAGA
ATTTACAGTGGAACCAGAGCCAAGAAGTCTTATTGTGGTGAGTTGGGAATTAGGGAAAGTGTTATACAGT
TGACCCTCAAACAGTGTGAGGGTTCGGGGCGCTGAGCCCTAACCTCAAGTAAGAGGTTCATGATGATGCA
ATCAAAGAATTTACACTGGAACCAGAGCCAAGAAGTCTTTTTTTTTTTTTTTTTTTTTTTTTGAGACGGA
GTTTCGCTCTGTCGCCCAGGCTGGAGTGCAGTGGCGCGATCTCGACTCACTGCAAGCTCCGCCTCCCGGG
TTCACGCCATTCTCCTGCCTCAGCCTCCCGTGTAGCTGGGACTACAGGCGCGCGCCACCATGCCCAGCTA
ATTTTTGTATTTTTAGTAGAGACGGGGTTTCACCGTGTTAGCCAGGATGGTCTCGATCTCCTGACCTCGT
GATCCGCCCGTCTCGGCCTCCCAAAGTGCTGGGATTACAGGCGTGAGCCACCGCGCCCGGCAGCCAAGAA
GTCTTATGGTGGTGAGTTGAGAAGTAGGGAGGTGGAAATAAGGAATGGAGATGAAGACATGAAAGGAATT
TGAGAAATGAGGCAATAGCTAGAGAAGAATATAGGAATACACAGATCCAGCAACCCAGCAAGGGAAGGGC
TAGATTCTGATTTCATGAGCAAATTGCCTACTAATTAAATTCACAATATCAGAGGAAACTGTTGGACTCA
CTTACTGAATAATAGCTGAAAAGTATCTTTGCTTTATAGAGAGATCACTGTAGATGAAAGTCATCTTCCA
GTGGTGAGATATTCTTCAGTGTCATCTCTTCATTTTTATTTCTAATTTTTCTTAATTTGAATTATTTCTT
CTGATAATGGGAATGATGTGGTAATTTTGTCTCTCCTGTAAATTATTTTAAAGATTTGTACGAACTCCTT
TGGCAGGCTTGAGTGTGTTGTGACAGCTTGGCTTAGATATGCATTGAATGTCATTGAATTCAAACTCCTT
ACCAACATAGTTAGATAGCCCATAGGCATTCTACTTGACCCTTTCAAGGAGATCTGGAGATGCAATTGTA
GGGGAAAAAAGAAGAAAAGAATTCAAGAAGCAACAAAGTGAAAGATAATTTGGCTTGCAGAAGAGAGGTC
TTTCTATCACAGTAATAATAATGCCAATTATATGTCCATATATATATATACGCACACATATATATAGTAT
ATATATATACACATATAACTCAGACATAATTCTTTCATAGTTCTTTCTTTTGTGCACAGATTCACTTCTG
TTATAATTACATACTTATGTGACCTATTTGTTAGTAATTGCTTCAGTTTCTTAAAAGAGCATCACCTTGC
TGTGCAAAGTGTGATTGAAGCCTCAACATCTCTTGGGAGTTTTTTTAGAATTTTGAAATCCCAGGCCCCA
CTTCAGAACTGTTGAATCAGAATCCGCCATTGTAAGACAATCCCCAAGGGATCTGCACGCACGTTGCAGC
TTGAGAAGCACTGCAGTATCACACATATACACACATATTCAACACCAAAGAGAGAGAAAGAGGTCATAAG
CTCTCAGGTGGAGACTAGTTCCATGTATATATGCATAGAGAGAAGAACAAACTCTACCTTCCAGCAACGT
AAAATTCTACTCAATCATGTATTCACCAAAAAAGAAAAGGCTTTCTCCATATAATGTGTATTATTCATAT
ATTGGCACTCTTCAGAGCTCTTCATTCCACCCTAATGTTATCTTTCTTAGATAATTCACATGACACTTTG
TTATCTTCCAATAATTTCTGTCATTGTTATAAGCGAAATTATTCAGGCTTTATCTAAGAGAGTAAATCAA
ACAGTATGCCTCTCTCATTCCAATTCTGCAATATTTTCATTCTAGAATGTCTAAAGGAGCCTTGAAAGAG
AGGAGAAGTCACCTAAGGCCAGCTAGAGGGGATATATAGCAGGGAATGGTGGCAACTCCACTCCTCGTAG
CCCAGTGGGGTTTTTTTTTTTTCCAATCTGTATTTGTATGTGAGTATCACGTCTATGCCGATTTTATGTG
TACATATGTAACTCAAATCTGTTCATTGTGCTAGTTAGAATCTTATTTCCCCCTCTTCTACTACACTCTA
CCCTTTCTCTTTCCCCTCCTTTGGCAACCAAGACACTGAGTTATTAATAAGCAGATTGGAGCAAACATTT
TGATGCACTATTGTTTGATAGATTTGTTGGTTCATTCAATAAGCATTAATTGAGCACTTGCTAAGTGTTA
AACAATGTACTAATTGCTAGATTTAAGGATGAAAATGATAAAACCCTTGGCCTCTAGAGCCTAGAGTGTA
GTTGGGGAGACAAATGGGCAAATTAGTCACACGACAACATATTCCTTGTTAAAACAGACAGTTGTGCATA
AGTCTGTATACCCAGACTGGAGATGACTCTGTTTCCAATGTTGCCCTGGGAAACCTCATGATCAGTTTAA
TAATGATGTTTGGGGTGAGAGGATACTGAGACAGTTTGCTTCTAGCATAGTAATTACCCATAGAAGTTTG
GGGTCTTTATTCAAAAGAGTTTACAGGCCACATGAGCCACTGTCTTGCCTTTTATAGGATCACATCTAAG
TTCCGTGTCATATAATGGCCTTGGCCTTCTTGGCTTTCTCTGTGCTCTTTGCCTGCCAATACCCTAATTA
TTGAAGTACTGTCTCCCGCAGCTCCTCAACCATGAGCTGTTCCCGATCCTCCCAGCAGCTATGTTTCTCC
TTTCTTCAAACCTCTTTAGCTTTTTATTTGTACTTTATTTGTACTAAATTGTATTTAGAGCTTTGGAGAA
CATTCTTCATAGTTGTAATTAGACTGTAAAGTCCTGAGAATGTATTTTTCATCTTCGTAGCCCCCTGCAG
TATCTAGCAGAATGCCTTTAAACAAATGGGCAGTAAATAAATCCCAACAAACTTAAATTAAATTTCTCCA
AATTGCATATTTAATTTTATAGTGGCATTTACTGATAACATACATTGAAATAAAGGCCAGAGCATAATCC
TCTCTGTTTCTGAATATTATTTATTTAAATATTAACTTTCTAATCCAATTAGGTCTTTCAATGACACTTT
AGATCTAAATTTATTTTTGCATTGTTTTAAATGTCATCAAATGATTCATCTCTTGTGTTTTTTAATATTT
TTGGAACGAACGTGTGAAAATGAGCAAGTGTCATCAGAATATGATGCTTGGGTTTTTTTAATTCAACATT
TCTTTGATCATATATTTAAAGACTTTTTCTCAATTCCTTTCTGGATGTGGCCTCACAAATCATTTCAGAA
GTCAATCCATTTCAAGATTTTTTTTTTTTTTTTTGCTTTTTTCACTTCACAGGAAGTCAAGTTCATTCTT
TAAAATGTAGCAAATGATTAAGCAAATTCAACGAATGATCTTCATCAACTCCGAGGTGTTTTTCCCCCTT
GAAAAATTTAAGTTACTATTATTTTTTTTTCTTTTTTTTTTTTTTTGATACAGAGTCTCACTCTGTTACC
CAGGCTAGAGTGCAGTGGTGTGATCTCGGCTCACTGCAAGCTCCACCTCCTGGGTTCACGCCATTCTCCT
GCCTCAGCCTCCCGAGCAGCTGGTACCACAGGCGCCTGCCACCATGTCTGGCTAATTTTGTGCATTTTTA
GTAGAGATGGGGTTTCTCCTTGTTAGCCAGGATGGTCTCGATCTCCTGACCTCGTGATCCACCCACCTCG
GCCTCCCAAAGTGCTGGGATTACAGGCGTGAGCCACTGCGCCCGGCCAATTATTATTATTTTTTTTAAAC
TTCACCTATCATAAATCTTTTAAAATTTCACCTATGATAAACTTCCTCTGTCATCTGGGGAATTACTTAA
ATGCAATGATGGCCTTCAAGTATACTACCAGGCAGCCTATCCAAATCATGAAACAGAAAGGCTCATAGAC
CAAATTAAAATACTTGAATCACAGAGTTTATTAAAATCACAGTGAGAAGCAAACGGGAAAGATATGTGCT
AAGTTAACACGCTTAGAATAGAGTGTAAGCAGACTGTGAAGATTAGAGTACTTGAATTCTGCAGTACACA
ACATTATATGTCTTGTCTGTCTCTGTATTGCATCAGCCTTCCCAATTATGGTGTGCTTACAAGGACCAAA
GTTGACTTCCCAACAAGGGAGTCCAAAATGGGTGGTGCCTGATTCAGTGGCATGTGGTTTATCAGAGACA
CAGAGACAAGAATGCATGGCCACAGCTGTAACTTGCCAAAATAGCCTGATGACTAGCCATGTAATTCTCA
GGCAGAAGACTTACGGTGCTGGAATAGGTATCACCTATGGATGCCTGAATTAAGACCTTGTGAACATTAA
GTGCTCATGTGTATTTATTTGATCTTGAATATTTAGTGCCTCTTGTATATTTGGTCTCATGTGTATTTAG
CATATTATGAATATTTAGTACCCAGGTGCCTCATGAATATTGGGTATCTTTTGGTCCTTCTATCCCTCAC
TATCTATGTTTAGTACACACATGCTCTGCTTGCTAACTACTTATCTTCTAATTAACACATTCCAAGAGCC
AATTATGTGTATCTCTTTCCACTGAGTTCTTCATTCAATGACATCAAGTTAGTTGCTTGAAATCAGCTAT
TGTGAGAGCACTTACACCACAGAAATTGGCAAATGCTACAATTAGCGCCACTGCCCTCCCCTAGAGCCAG
TTATTTGACATTTACTAGCATTCCACTACTTACATGGCCCTTCATGCTCTCACTCCGTGTGACCACTCAA
GCCTTATCCCTCTTTACTGAACTCTACAATCAAATAAAATATCTTTGTTTCTTGCTTCTGGCCCTCCATC
AAATGGCTCCCTCTCCTAGGAACAATCTGTCTCTCCTCTATCACCTTTGTTTAGCTAGTTAATAATCCCT
TTTCAGACAGCACCTCATAAATAGATTCCTGAACATCCCAAACCGGATCTCCTGCACCTTCAATGTGCTA
CTTCAGTACATTTGTCTTACCCTTTGCCATATGGTATTTCAATTGCCCATGAATTTGTATTCCTGTTTAG
ATCTTAAGCTTTGTGAGGTCTTTTTGTACTTTTTTGTACTTCCGTATACCTACCACATAATAAATATTTA
ATGAAAGCATTAATGAATAAGTAAGTGAATGGAGTGAGTGAATGAGTATTCAATTATGATTCATTTGTAT
CAAAGTGATAACATATACTTACAGGGAAAAGGCCAGAGGGGGAAAAAATAAAAAATAATAATATATTTTA
TGTATGACCTTGTGTGGGGAAAGGAACATAGGGCCACTGCCTGGCCTGCTTCTTTTATGCAAATCCTAAT
GTAAAATATGATCAACGCCTGGCTGGGCAGAAATACAAAAACCCAGTACTAGTGATTCTCCCAACCAGAT
ACCAGCTAGTACAGATCATAGCCAGATTTAACTACTGTGAAGTGGTTAGGTTAGAGGTGACCTATAAGGA
AATGACGCTAATGATCATTAGCATCATCTTGGAAGCTTAAAAAAATGCCCCAGCTGTACCCCAAGCCAAT
GATATCAGACTTTTGTGGGGAACCCAGATATCATTGTTTTTAATCTTTAATGATTCCAATTTAGCCAAAG
TTGAGTCTCAACAAACCAAGTTCTTCTTACTCTCATATTCTCTTCTTCTCGCATAGATAAGAATTAACAG
CCAGCTCTTCTACATGTTTCTTAGACACATATATTGTTTCAGTGGTAATTCGTTAACAGTGCATATGTCA
GCAAAGCATGACTGAAAAAAATATCTGCTCCCACACATTCTGATCCCATCTTGACACTGCATAGCTGTTG
GCGAAGGCAATTTCAACAATGAAGAAGTGGGAGAAATGACTACATTTTATGTAAATATGTATTCATTGAA
AATCAAAAGGACATATGTAATGATATTGTTTAAGATTCTAAATGAAGGACAATACTTAAGAGTCCTCTGT
AGTCAAATTTCTCAGCAGTAAAAAAACATTGTCTTTTCTTTACAACTATTAACCATATGGCTGTGAAAAT
GTTATTCTACAAGCCTTTAAGATTTGAAATCTGACTTTATGTTAATACACAGAATTTACCACACAATCCT
GTATGATTTCTAAGTAGATTTAAAGAGTAGCTATTGCTCACCTTTTCAACATAATGGTAATGATGGTGCA
ATGTCAATTACATGATACTCTCATGGGCGTGATTATATGATTGTTAACACACTGAAGTGCTTATATAGAC
ATAGATACTGATTTTTATATGTACATATTTAAAACAAACAAGGACTTAAAATGGCCTGTAAAAGTCTTTC
TAGTCAGTCTTTCTGGTTTTGGACAGAGAACAAATAATCCCTTACAGCTGTTAGGTTGGTGCAAAAGTAA
TTGTGGTCTTTGCCATTGCTTTTAATGGTAAAAAAAACGCAATTACTTTTGCACCAACCTAATAGTTATC
TACTTCCATCTTTAACGGGCCCTACCCAAGACTGCATGGTATATAAGTAAGAAATGTAAATGAAAATCTC
AAATGCTAGATCTGCCCAGGAGGGGACCACTAATGAGAGAGGAAATGTTAACGTCCCATATGAACTAAGC
TCAGCTTAGCATTTACCCTTCCTGCTATTCCGCTAGAGCAGTGCTTCTCAAAAGTTGACCTGTAATGGAA
TCTTCTGAATGCCTTTTTAAAACGTAGCTGGCTGGGCCCCATCCCCAGAGTTTCTGTGTCAGTTGGTCTG
GGATGGGGCCTGAGAATTTGCATCTCTAACAAGTTCTCAGGGGATGTTGCCGGCCCTTGAATCACAACTT
AAAAACCTCTGCTCTGAAGAAAGGGAAAGCTCTCTCTGCTGGATTTCCCCAAGCCTTTTTCAGATTTTCA
GGAGACTTCTGTGCGGTAGCTTGCTTCCTTCTTTCCATACTACTACTACTACCACTACTACTACTACAAA
TAGCAACCTCTAGCATATTTTCAGTACTAAATACCCAGCACTATATATACATCACAAAAGTCCCTTGAGG
AAGGTGGTATTATCATCTCCATTCTGCGGATAAGGAAATAGATAAGAAATTTGCTGAAGATCGCAGAGCC
AAATGAGACTCAAACCCATGTAACCCATGTCTGTTTGACTTTAAAGCCCGGAATCTTAATTTGTTCCAGA
CAAGCTCATTATGTGCTCTGATCTTCACCACTGAAATGTTCTGAATATGAGGCTGAGGGCAGCAGTGAGG
TTGGAAGGAGCAGCCCAGAGGAGCAGGCACTGTGCTGGTAGAATAGTAGTATGGTGGGGCCTGCACTCCC
TAATAAAAGAAGGGGACAATGACTATTTCCTCCTTCTCCAAGGTCGTGCTGCCTCCCATTTCTCTGTCTG
CCTGGTAAGAAGCAGCTCTGGGCCATGTGTGGTGGCTCACACTTGTAATCCCAGTGCTTTGGGAGGCTGA
GGCGGGAGGATCTCTTGAGCCCAGGAAATTAAGACCAACCCTAGCAATCTAGTGGGACTTCATCTCTAAT
AAAAATAAAAAACTTAGCTGGGTGTGGTGGCACACACCTATAATCCCAACTACTCAGGAGGCTGAGGTGG
GAGGATTGCTTGAGCTTGGGAAGTCGAAGCTGCAGTGAGCCGTGGTCTCACCACTGCACTCCAGCTTGGG
CAGCAGGGTGAGACCCTGTCTCCAGAAAAACAAAAAGCAGCAGCTCTGAAAAGAGGATCTAGCAGTTTCT
ATATGCAGGAGAGCATTTGCGCAATTGTTCCTGGGGTTGAATCTGAGAAACTCACAGTGCACATTCAGAT
ACTATTTACAATCTTCTAGGAATAGTATAAATATTGTGGCCAGGGCACCTTCATATTGTGAAACACAAAA
AGACTTCAGACCTTAGATTATGTGTCGAAAGTTAGGCACCAATGATTTTTTTTTCCATTTGTTCTTAAGT
GGCAAATCTTTACATTAACATTTTTGGTACTTGTCTTTAGGGAAATTTCTTCTCTGTTCTGAATGTATAT
ATTGTAATTCCTCATTTACAATTTTGCCTGCAAATGCAAGTGAGTACAGATCATCCAGTTATGAAAATGC
TCTGAGATTTGAGTCTAGCTGTTTCAGCTTTAAGAGCCCTGACCTAGACTTTGAAACTGACATGGTTTTA
TATGTATGTGGTTGGAATTAAACCCAAAGCACATCTTTTAAAACTCTGAGGAACTTCTGTGCCACAGCTT
TCGCTCAGTTGGTGAGATTTTACTTTGAAATTTAAGGGATGAGTCTAGTTTATATGCAAAGAAATGTAGG
GAGCTTTGCAAACCCAATCAAATCCTTTGTGAACAGTGTGTGCATCTGTTTATTTTGCTGTCATTTTGAG
TCCATGATCCTGTATACTGTTTTGTGGGCACATATTGAGGGTAATATCAAATACCATGTAGAACAGATGC
TGCAGGTATCCTTTCCATGTCCTCTTAGCTTTGGGGTGGTAGATGGGCACATGGACCAAGCCCAAAGTGA
CAGGGTATTAACAGGAGCAAGACTCAACCAATAAGGGAGAGTAGATGGGTACAAATCTCAGCTTTCTCTC
CCCTCACTGGGATAATTTTGAGATATATTCCAAAGATCCTCAGAGCATCCCCAACAGCATTGAGCCCCAG
TTCCCCAGATTAGTAATCTACTCAATAAATACCTCTTTTTTTTTTTTTTTTCCCGAGATGGAGTCTCACT
CTGCACCCTGGCTGGAGTGCAGTGGCACAATCTCAGCTCACTGCAACCTCCACCTCCCGAGTTCAAGTGA
TTCTCCTGCCTCAGCCTCTTGAGTAGCTGGGACTACAGGCATGCGCCACCACACCCAACTAATTTTTGTA
TTTTTAGTAGAGATGGGGTTTCACCATTTGGCCAGGCTGGTCTAGAACTCCTGATCTCAAGTGATCCGCC
CGCCTTGGCCTCCCAAAGTCCTGGGATTACAGGCATGAGCCACCACGCCCAGCCCAATAAAGAACTCTGG
ATTGTTTCTTCCTTTTCCTCTCCTCCTTTCCTGTTCCCTACAGTGTTTCCTAGGATCACCTCAGTCTGCT
GTATGGGAAACCCAGACTGAGTCACCATAACAGACAGAGGCATTGTTACTTTAGGACTTTAGTGGATATA
GTTACATGGGAGAGAGAGACTGTGTATGTATATATAACCTTTATAATATTAAACCATGCTATACTCAAAT
TATTTACTGGCCAAGATTTCCAATATAAATTGGAAATAAATTGGATATAAATCAAGAACAGTTAAAATTG
GAAATAGTTAAAATACAAATAAAATAGCTAAAATTGGGCAAAATACCTGACCCAATGCTTTAATATCCGA
TTGCATAATTAAACGAGTAAAGAGGAAAGGAAATTATTAGCAACTCTATATTTAAATGCAACTGACATCC
AAGGAAGTCATGAAGAAAACTCTTTGTGTTGATAAACTGAAGGCCTCTTCTAGCAGACTTCTGTGTTTAT
TGTTCTGTTGCTGACTATTTTATTCCAAACAAATGAACTTGCTTGTCATTATACCCCACCCTTCCCTAGT
ACAGGGCCCCCATTCTTTGAAACAGTAACTCATTCAGTTCCAAGGAGAATATGAAAAGGGAGGGTAATAT
ATAAAAGAACTGAAATGAAAAGTGGCCTAAGTGTGGCACATTTCCATTGTGGATTCCATGGCAATGGAGA
ATTGATGGCAGAGCATGGTGAGAGATGTGAAGCATCAATTGGCTGTATCTCCAGGGAATTCCTGAAGTTC
AGTTGCCACCCTGGAGGGTGGCAAATGCTCTCTCTCACCTTCCTTGAGTTATTGCTTAGATGACTCAAAA
CAAAAAACTGATGAGCTATAAATGGGCTGTATTATTTGTTTTTACCTGCTGAGTAGTTCAGATATTTCAA
AATAATCTCAAACTTAACCTATGGTGTGGTTTCTGTGTTAAACAAAATACCGTAACTTTTAGTTGAAAAT
ACTGTGTAAGCCCACACAATCTCTTGTTCACAGATAATCTTGTTGTCAAACATTCATGATGACAAAAACT
CATAAACGATTCTTTTAAATATCAAGAATAACTTATGCTGTAAGTCATAATTTCATAAGCATGAATTTAT
GAATGTGTTTTGTGTTTGCAATTTTCATTTAGGTTGTCTTAAAATCATGCGTTTTAGCTTAACTTAGGAG
AAATATATCTTTTGTGACAACATAGGATATTCAGAGAAACGTGAAAACTAGGTGATGTGTTTTATGAAAG
AAGGCATAAAGTATATCAAGCATAAGAACTTTGAATTCTATTTGTGTTTTTTGTGGCTTTAGAAAAGATT
GTTCTGGGAATAGAGAATTCCATTTGGGAAACCTAGCACATACACAGTAGCAGAGTTAAAATACTGACTT
GGAGGGTTCATTTGAAGAATTCTATAGAATTTTTGCATGTTGGGAATAGGTTTATATTCTTAAACATTGC
ACTCAGGGTTTCTATTCAAAGCAAAAATAACTTTGCATAGACCTTGGCCATTCTTTCACATTCTAAAGTA
ATCCATTTTTTTTTTTCAGGGTAGTTGTTCTCAGTCCTGATTTTCTGATAATTCAGATCATCTTTAATTT
ACACCAAAAACTTTTAGAAGAGTCAGATAATAATTTAACATAAAATGTAAATGACTGAAATATACATTTT
TTAAAGGAGCAGATATGGAGGGGTCCAATGTACTTAACTATTTGCTCTCTTTGTCTCCTTGCATTCACGG
GAATGTTTCTATGTAGTTTTCTAATTTCACACAATTTCAATAATCCATACCCTCCTCATTTTTATGGGCC
TTCATGATACTAAAAATGTTACCAGAAATTATTTTGTGTTAGTCTCTTTGTTTAGCACATTCATACATAA
GTTTTAACATTTAACTGGCATATTTTTAAAGTAATACATGTTTTTTTTTTAAAAAAAATCAGTTATGTTT
GTGTGTGTGCATATTTTCTTTTGTGGCCAAATGTTGCACGCCCTAGTCCTTCTATTTAAACAATGAGTTT
ACATAACAAATGTTACATGATAAACATGAAGACATTTAGTTTGAAAAAAAATGATTTTCTAGTTTACTCA
TTTAAAAAAAGCTGAAGTAACCGGGAAGAGGAGTGGCAGAACATATTAGTCTTTTTCATAATGCCATCAT
TAAACAAAGATACTTAATTTCCAGGCCTGGTGCAGTGGCGCAGCCTGTAATCCCAGTACTTTGGGAGGCT
GAGGAGGGCAGATCACTTGAGGTCAGGAGTTCGAGACCAGCTTTGCCAATATGGTGAAACCCTGTCTCAA
AAAAAAAAAAAAAAGAAAAAGAAAAAGCTACATAATTTCCAAAATGACTTCAGTGGGACCTGAGGTGAGG
GAATAAAGGCTCTGGAGTAATTTCACTCTCTATTCCTCTCCTAATTTTTTTTCTGTTCCTTTATAACAAC
ATTTTCACTACTTTTGAGCTTGGGAGTTGAGGAATCATGACCAGAAGAAAAGGAAAGACGGGAAAGATGT
TCAAGGGTGAGGATGCTTAAGAATGACCTGGCAAGCTTATGAAAATGCAGTTGTCTGGATCCCACCACAG
AGATTCTGATTTAGCAGGTCTGTGGCAAGGCCTGCGATTCTGCATTGCTAACCAGCTCCCAGGTGATGAC
ACTCATGCTGGCAACCTATGAACCATTGAGTGGCACTGTTCCAGGGGGCAGGGCAATGAGAAATTGAAGT
CAAAAGCCCCAAGACCTGGTGCTACGAAAATACTCTGGTTCCTTCCCTCTCAACTGATTTACTTGTCGGT
GTGATTTTGCAAAAATCCCTGAACTTCTTAAATCCCAGTTACCTCACCTGAAAAGTATGAGTGTTGCTCC
AGATCTGGAGGCTTTCAGACCATGCAAATCGAATTCAAACCATGCAAACCATTCAAGTCATTCTAGAAAG
TTCTGCAAGGTGCCTCAGAGGCCAAAGGGAGAGATGGGAAGAGGGATTGAATGGGCTCTTTCCAAGGTTC
CCTAACCCACTTGAATACTTTCATCTTTTATCTCTTTCATATATTCCACTTTTGAGTATGGTTTCATTTA
GAAAATAGGATTTTATACCAACAGATTTAAAGAAAAACTCCAAGTCTGAAAATGACTCATTTATTTAAAA
CTGTATAGAACAAAGACATTTAGTGCACAATTCCAAAAATTCTCTGATCCTTCCACAGCATGCCCAGTAT
GCTGCAAGAGTGCCAGCAAACACATGCTTACTGCTCACAAATGTGAAATTTAACCCCATGCACTAGGAGG
TCCCTAGTGTGGGGTGGTTTTAGCTAACCAGACTAAGAGAGTACAGGGCAACATCGAGCCTTTCTCTGCG
GTCATGTCTGATTCATTAAAAATCCAGCTTTCCCCGAAGATATATTAATTACCTTCTGTTTCAGAATTTG
TTTTTAGAGCCTAATTCTTAATTATATCTCCAGCCATTGTGTGATTTGACCATTTTGGAACTAAAAAGTT
ATCCTATGAAATTCCACCTCCAACTATTGCCACACTGTTAGTTTGTCTATTTCATACACCATGCCAATCT
TAGCGTGGTGCTAGCATTTCATTATAACCAGCTTTCATTTTTAATAAGACCATGTGTATATGAAATTGTA
GACTTCAGTCTTTGTATGAATTGAAAGCTATTAATCTTCCCAGGGTTAGGTTATGTTAAACAGATTGTAA
TGTTCTTCTTTTTATTATGTTATTTAAATCCCCTTCATTTCATACTGCACCAATACATTTCTACTATCTT
GGAATAAATTAATTCCAGTTACGTGATGGAAAATTTTAGTGTAAAAATATAACCTGCAGTATAATTTTTT
CTGTCAGAATACCAACTAGAACTGGTATGTTTCATTCTAATTGGAAATTTGAGTTATCGCTTTGATTTTT
AACAGTGGGAAAGGAAAATGAAGATTGATATCTTTCAATAGCCGTTCATTCATTCTTCATTCCTTCATTC
ATTCACGTATTAAGAATAGTCTATGTGCTAAGAACAGAAAGAGTGTTAGAGATATGAAGATTAATAAGAC
CAGATCCCTGCCTGCAGGCATTTCCTATTCTATGTCATAGATAGGGGGCTATTCTGTTTAGAGGTAAAGC
ATGACCCACATTGCCTCTGACAAGAAGCATAATGTCTGTAGCAGCTAACTGCTGGAGACAGGAGGCTAGA
GGGCTGCCCTGGTAATTGGTATTCAAGTCTTCAAGAAAGGAAACCAGCTATTCCAAAATCAGTGGGCAAG
AGGAAGTTGTAAAGTTAAGTGAAATGACTAAAATATGAATAACTAAAGGTTGGAATCTGGTAGAAGGAGA
GGAGAGCATCGGTCAGCACCTTAGTTTGGGAAGGTGGTGTGGCCATAGTAGGCTTTATTTAGAAAGAAGC
AATTCTTAGGTACCAGCTAGGTTTCAGTTCCTTAAGGGGAGAAAACTGGCAAAATATAGGCAGGTTTCCA
GGGTGCAAAGCCACGTTCTAGCTTCAGCTCAGGCAAGGCCCTGGGGTATGAATCACCACCAGAGTAGCCC
AGCCAAAATGACTAAGGGATCTAAGCTGGTTGCTAATGAAAGAGGTTGCAGCTCAAGGCAGCTCTGCTGA
CGCCCACTGGATACTGGGATTACATTGATTTAACACATGGAAACCACTTAATATGGTATGTGGCACAACA
CAATTAAGTACTCATAAATATTTGCAGATAATGCTGCTGCCATTGCTGTTTTTGTCGTTAGAAGACTCGG
GAAAATCATCTAATACAGGAATCCATCTGTTGGCGGGGCTTGGGCTTCTAATATTTGACTGGTTGATTTT
TGTCGACCCAATCTTAACAATATTATACACAGCCATTACTTCAGGAAAGGCAGTTGTAAAGAATGGTATA
AATTTCCTGTAACTTGACTGCCACATTCTAGCTGAGTCACCTCTATATACCTCAGTTTCTTTGTATCCGC
AGTGAAGATTAATGACCTCATAGGGTTGTTATTAGAATGAAGTGAATTACTACACTGGACTTATTTAGGA
CAGTAACTCGCACATAGTGAGTGCTCAAGGAAATCTCAGACCCTGCCTGCTAGTGGAGGGTCCAGCTCCT
GATACATTTGGGGGCAGGTTTAAGGAGTTCATTGATTTAGAGCTGTAAGGGCTGATCTTTCACCCTGCAT
GTCTTCAGCAACTGTGGCTGGTAAAGTCCAGAGCAGTCAAAGGCTGACAAATCCTTGTTAGAAATCACAA
ATGCCCATTCTCACAACTTCTGTGGTGTTTTCCATCCTTTCCCTAGAATACTTTCTTTTTAAGGCAAAGG
AAAGAATAATCACTGCAGATAGCACACAGTATTTTTTTGCAACATATTTTCAAAAATTATGATGAGAAAA
GTGTATCATTCCTGTGAAGAAACAGCATAAGGAAAATGATTTGAGAAAGAAACATGGTTCTTAAACTGAA
ACAAGTGTCAGAAGGAATCCCAGAAGGCAGAAGGAAATATAGTAATCATGATGAAGTCTAGAGCTCACAC
CGGTTAACAGAATGGCAGCAGCGATATTCATCTCACGCCTCTTCCATGCTGTCCCTGAGTGAGCTTCTGC
TGAATTGCCTGGCTGGTGAGGATTGGTTTCAGCAGCAGAAGGAATGGGCTGCCAGCTGAAGGCTCTGGTT
CTGATCCTGGGTAGGGTCAGAGAAAGCAAGATGTGACCATCACTTTTGACCTTGGTCTTGAATTTGATTC
CATGGAACAACGATATTTTACAAACCCAGTTGAAGGTTTATCCCTTTTTCTATTCAACACAGGGAGAGTC
CTTAGAGCCCCAGGAAGACTTAGCCCTTTTTCATTCTAAGAGTAAACCACATCTAGGTTTCCAGAGATGA
AAAGACCAGGCTCTGATCTTCCTTCTGGAAGCCCTTGCCTATTCAACAAGCATGAGTATTAAATGCTATT
GCCTTGGAATCATAATTCAGTTTTCACAGTTTGGGCTATGTCAGAACCATTCTTGTCAACCCCCTGTTTT
CTGAGAACCCGAAACCTGCTTGTTTAGAATTTTAGAATCTACTTGACTCTTACAGGGGAGAAAAGATCTC
TTTTCTCACCCATCGCTAGGTTCATGGCTGAGGCACCTATAATGAAGGACAAATCAACAACATAAAAGCA
TGCGAATTTATTTAATATAAGTTTCACATGACACAGGAGCCTTCAGAAATGACCCAAAGAATCAGGGAAA
AGTGTGTATTTTTATGCTCTGATTTGAGGAAAAGTAGATGTCCAGTATGACTGGACAAAGGGGAATGGTA
ATAAACTGGGGTGACCACAGCAAGGCCTGTTTCTGCAGAACCTCCTGTGTCCCTGTGTTTTCAGAGGTAA
AAATTTTCCTTTCCTTCCAGTATAGTAAGGGCACCTCTGGTATGATAGTCTCATGACCTGCTTCAGGGGA
GAAGGGGGAAGGGGAAGGTGAGAGTGACCATCCTGCTTCTGCTGTCTTCTCAAATACCAAGCTGCCATAT
TGTGGATTTTGGAGTAGCGTAACTTGAATCCTTTTTTTTTTTTTTTTTTGAGACGGAGTCTCACCCTGTA
ACCCAGGCTGGAGTGCAATGGCACAATCTCGGCTCACTACAACCTCCACCTCCCAAGTTCAAGTGATTCT
CCTGCCTCAGCCTCCCGAGTAACTGGGATTACAGGCACATGCCACCATGCCTGGCAAATTTTTTGTATCT
TTAGTAGAGATGGGGTTTCACCATGTTAGCCGGACTGGTCTTGAACTCCTGACCTCGTGGTCCGCCCACT
TCGGCCTCCCAAAGTGCTGAGCCACCGCACCCAGCCGCATAGCTTGAATCTTATCAATACCTTAACCAAA
TGACTCTGACAGTTTTCCTCTTCTTATCTAAATTCTTGAGGGTCACCCACACTTCCCAATGTCTTTTGAA
ACTTGACCTCTTTTCTGCTGAATTGAGGAAGATACCTGATTTCTTTAACCTCACCAAATTCCTACTTCTT
ACTGTTGTTCATTGCTGGCTGAAAATTTACTTTGGCGAGTTCACCAAGAACATACTTATCGGTTCACTGT
TTATATTTGCACTCAAGATAACACTTGAGGCCCTGCTACTCAAAGAATTTAGTGACAACTTTCTTCATCA
CTCTCATATCTTATCTGTCATCAAGTCTTTTTTTCCTCGTAAAAATGCTTTTAGCTCTTTAAGTATGTTT
CATATCTATAATAGCTAAGATAGGCTAACAGCTATAATATATTAAACATCCACCAAATGGACTATTAAAA
TGACTTAAACAAAATAGAAATGTATTTCTTTCTCATGTAAACAGTCTAAGGTGAATTCATGTTAGTTGGT
GTTGGATGTGTGTGTGGGAAGGGAGGGGTGACACCCACATAATTATTCAAGAATACAGGCCAGGCCAGGT
GCAGTGGCTCACACCTGTAATCCCAGCACTTTGGGAGGCCAAGGTGGGCGGATCACCTGAGGTCAGGAGC
TCGAGACCATCCTGGCCAACATGATGAAACCCCATCTCTACTAAAAATACAAAAAATAGCTAGGAGTGGT
GGTGGGCACCTGTAATCCCAGCTACTTGGGAGGCTGAAGCAGGAGAATCACTTGAAGCCGGGAGGCGGAG
GTTGCAGTGAGACAAGATCATGCCACTGCACTCCAGCCTGGCGACAGAGCAAGACTCTATCTAAAAAAAA
TAAAATAAAATAAAAATAAAAAATAAAAAATAAATTAAAAAAAAAACAGGCCAGCAAGGGTCTTCCATCT
GCAATAGCCAATTGCCGAGGTTGCCCTCCTGAAGATATTCAGCCAGCCCAAAGGGGAATGAGCTAGAGGA
CTGCACACGGAGGCGTCCCATGTCCTTTGACTCAACCTTCTACTGGCTAGAACTCTGCCCTGTGGCCACA
TGTAACAGCAGAGGGGCTGGAAAATGAAGTCTAGCTAGATACCTAAAAAGAAGCAGAGAAAGGTTTCAAG
AGCATTTAGCAACCATATCCACCTTATTCATGCCCTGCCCTCTATTCGCAGTGGCCCCGCAGCACTGCTC
AACTAGCTTGCTGCATTGGCCTCTTATCTCTTATCTATTGCCTTAGATCCATCTAAATGCTCTGCTACTC
TTATGCCTGGAATATGTTTTCAAGATGTGACTAATCCTCTCACAGCTTGAAGGATAAAAGGTCAAACTGC
TCTGGTGAATGCATGATGCCTGGTCACCTCTGTAGCCCCATCTTCCCTGACACTTTCACAGACAGTATTC
CCTTTACTCCAACCTGTGGGAGTATTTTCTAATTCACAATAATAGCAGGAAATACAATGTGGACCAGACA
CAGTTCTGAGCAGTATATTAACTCATGCATTTCTTACGATAACTTTATAAGGTTGACAGTAGTAGTATCC
CTATTTCACAGAGAAGGAAAGAGATACAGATAAGTAATTTACATATGATCTCACAGATAGTAAGTGGTAC
AGCTTGAGTGCATATGACTCAAAGGGTAGAGGTTCTAGATTCTTAATCACTGTATTGTACTACTTCTCCC
AATGTTATCGTACATGCCATTCCGTCTTCCTGGAATACCCTTCGTCTTTCTTCATCTAACTTCCACTCAA
ACTTTAAGGATCAATTTAAGCATGCCTTATTTTAGGTAGCCATGGTTGACATCAGCCTAATTTAATTGCT
ACTCATCTATGTCCCCATAGCGTCCTTTGCATTCCTCTATATCTCTCTGCTATAGCAGTAAATGTACCAC
CATTCCGTAAAATCCTTAAGGGAATGTTTAGTTTTATGTTCCCAATGCCAGCACAATGTCCAGAACAGTG
TTGTCCCATAGAAATGAGAGCCACCTATGTAATCTTAAGTATTCTAGTAGCCACGTTCTTTAAAAGTAGA
AGTGAAACTAATATTTTATTGACCCTGATATATCCAACATATTATTATTTCAATATGTAATCAATAAAAA
GTATTAATAAAATTTGCTTTTTCCATTCTAAGTCTTTGAAATCTGGCATGTGTCTTTCAATTGCATCCCA
TCTCAATTTGGACACCGTATTTTCATTGAAAATATTTGGTCTCACCTGCACACGTATGTTTATTGCGGCA
CTATTTACAGTAGCAAAGACTTGGAACCAACCCAAATGTCCATCAATGATAGACCGGATTAAGAAAATGT
GGCACATATATATCATGGAATACTATGCAGCCATAAAGAGGATGAGTTCAAGTCCTTTGTAGGGACGTGG
ATGAAGCTGGAAACCATCATTCTGAGCAAACTATCACAAGGACAGAAAACCAAACACCACATGTTCTTAC
TCACAGGCGGGAATTGAGCAATGAGAACACTTGGACACAGGGTGGGGAACATCACACACCAGGGCCTGTC
GTGGGGTGGGGGGAGGGGGGAGGGATAGCGTTAGGAGATATACCTAATGTAAATGACGAGTTAATGGGTG
CAGCACACCAACATGGCACATGTATACATATGTAACAAACCCGCACGTTGTGCACATGTGCCCTAGAACT
TAAAGTATAATAAAAAAAAAAGAAAATATTTGGTCTCTATTTACATTTCATAAACTTTATAGTTGAAAAA
AGAAGATTCACATTCCTAAGTTGTTCCAAACATACACAAAAGTTTTTCAATAACTGAACCAAGAGTCAAT
TTTTAAATTTATATTTAAATTTAATAAAATGGAATAAAAATTTGTTAAACTTCAGTCTCTCCGTCTCACT
AGCCTGATTTCAATTGCTCGGTAGCTACCTACAGCCAGTGGCTCCTGTGTTAGACAGAGCAGCACAGCCC
TAGAACACAGTAGATCCTAAATCGATGTTTATTGAAGAAATTAATCAATGACAGTGTAGAAAATTTGCAG
TGATTATGTCAGAATCAATAGTTCTCCACCCATTTTCTCCCACACTCTCAAAAGGGCCAAGTTTTATATC
ACCAAATGATATTCCTCTTACTTCTTTCTGAGCAGAAACAGTTTTGGAAATTAAGATCTTTTTCAAATTT
TCCAGACTCGGCATTTTAGCAGCGTTTCTATTTGTACCAACAATGCCTTTCTACCTATTTTCCTTGCTTC
TTAATAAGTTAACTTTGTGCGAAGGTCATTTTGTAGGTCAGTGTAATATTGTGCATTAAGGGCTTCTAAG
TTTTCTGGTATTATAAGAACTCCTTGGTTTCCTTCTACTTTTCAGAATGGAAAATCCTCAGAGCAATTTT
CATCTAAAAGTGCTGCATTTAGGTTGTTTCACAATTCCCCAACCCTGAGTCAAATATAGGTTGGTGTATG
AGCAGCAGTGTCTCTTGGCTAATCAAGAGCGTCTCCTTTTGCTACGCTCAGTGTTAGAGAAATGGAGAAA
GTCAGCTGGGTTTAGAGATTAGGTGAGAGACTCAGGCATATCCTTTGATAAGTCATAAATCATTTCCTGT
TTAGAAAAGCACATGTTTAGACACCCATAAAATCTCCAAATGAAGGGTGTTTTACTTTTCCTTCAAAATC
TCACTGGGAAAAGGTACTTCTGACTTTCCAAGTGAATAAAAATAATGACTCCTGATTACCATGTATGTTT
AAACTGATTTGCAAAGCAAGTGAAAAAGAGTCTAGTGAGTAGTGATAAGCATCTTTTAGACATCAGAAGA
TGTACTGATTTAAAGGTCCGTATCATTTTATAACTAGTATCTATTGAGATTCAAATGGTTATTACTCTGT
GTGAATCTGTCTTTTCTAATTGTTTTTACTTATTTTAGAATATCGATTTGTGAATATTAAATTCCTAAGT
TTTCCAGCAATCCAGTGTTTGTTTTGGATATCCAGCCTGGATGCAGAATAGCTGCAGAAAGTTATCACAA
ATTGATCTCTATATTCTGTTTCCGAGTGGCAATTGTCAAAAATTTGGGGTCATCGGCTACCCCTCCCACC
CCTAAGAAGTTCCTTGTACTTCCTCTTTCAAAACACTCACATCATTGTTCAGTGCCTCACTTCTCTACTA
AAATGTAACCAACCACAAAGATAGGGACTATGTCTTTCCTGTTTACTGGTGGATTCTCAGTATCTAGCAC
CATGACCAATGTTAATAGACGTTGAATCAATTCCAGTTGTTACCTCTTCACACTGGGACAAAAGTCCTTG
CAAGTATTCTGCTGCCATTTGTATAGATTCAAGCCAAATATGTCTCAAAACGATATTACAGATGATCTCT
TCGTTGTTCCTCTGACAATTTCTTTCCCCCCTGCATTGCTTAACTTGATTGACAATGACCCCTACTACTT
ATAACATGTGCCTTTTAGGTAGTGCACTTGGCACTACATTTTATGTGATAGTTTTATGATGCTAAAGACT
ATTTGCTGTGATGATGCTGTGTTCTCACATGGCATATCCAGATTTATTTATGCTGGTGACCAAAGGCAGG
TAGTTAACCTTGAAAATAGGTTAAAATTTGAAAGGCAGCAAATCTTAGGGCTAGAATTTATAATTTATCT
TTAAGGAATCTTGAAACCAGGTGTGAAGGAAGGGACGTAGGCTAGAAGTACAGAAACCTGGGTTCTGCTC
CAGCACTGATGTTAAGAGCAAGTTGCATTGCTTTTCTGGACCTTAATTTTCTCTTCTGGAAAATGAATAG
ATTAACTGGAACAAGGAAGGAAAATACGTGAATGGCTTCCGTTTCTGTCTCGTTTACCCCTGAAAGACAT
GGCTAGTCAGTCAGCTCTGTATCAGAGCACTTCTCAAGGCAATGCTCCAGGTAGCTACCACTCACTAATG
AGAGTTAGCACATAGGTAAAACCTCTTTGTCATCTCTAGGCTACTTCATGTTTAAGATACTCTCCAGCTT
TAAAATTCTAATAACTCTATTAGACTGAAATTTAAGAATACGAGAATAATCATCCCTCACCATGAAGAGA
GAGTCTGAGGAAAAAATAATGAGAACGAATAACCCTTCTCTTTTACTACAATTCAGGACTGCCATGAAGA
GCCGTCCAGATTGTGAAACATACAACTCATGATGTGAATGGTACTTCTTTGTTTTTCTCGGTGTACAACT
TGCACAGCTGTTCATGGCCCTCTGCTTCCACAAATTCATTTCTAAATAGCTGTACCTCAGTTCTTTGACT
TCTAGTATGTCTAATTTAATACACATTTCTAGATTTACGATATATAAGAAATATCTCCATGAAGGAAAAA
TGTAATAGCCCATGCTTTTCATTATAATAGAATTTTATGAAACAATGTCTTTTAAAAACAGAAACATATG
TACTACTACTTCGCAGGACATTAGCCCTTGTATATAAATCAATAATACAAAAAATTCAAATTACCAAGGA
TTAGAAAAGACTGCTGTGGGATATCTTCTGGTGCAAGCATACAGTTATTTATCCATTTCTTTCATGAATA
TTTATTGATGTTCCAAACATTAGGCTAGACACTAGAGACACATCAATAAATAAAGGAAATAGGTTTGATC
TCTATCTTCTTTGATCTGTAGTTTAGTGGGGGAGGAAGGAAATTAAACAAGTAACTACTACAGGTTGAAC
ATCCCTGATCCAAAAACCTGAAATCCAAATGTTCCAAATTCCAAAACTGTTTGAATGCTGACATGACATC
ACAAATGGAAAACTCCACTTCTGACCTCATGTGACAAGTCACAGTGAAAATGCAGGCACACCACATAGAG
TTTATTCAGCATCCCCAAGGGAAGAAAGATCCTCTCAGCCCCCGTTAGCTGTGATATATCTTTTCCACCC
ACACCCAGATTCCATCATACAAGCAAACCCACAAAAGGTACGAAAAATGGCACATGTGCGGGCTAGACGC
GACAACGGCAGGTACCCTACAATGTCCAGCATGGGGCCAAAACCTACGTGCATTAATCACTGTGTTTGCT
GGTATATTCTCTGGTGGTGTCAAGATATTGTTGAAAATGCCCTAAAGGCCTGCATGATATCCATAGGGTA
ATGCAAATATTCCAAAACCTGAAATTTGAAATACTTTCAGTCGCAAGTATTTTGGATATGAGATATTCAA
CCTATAGATGGTAAGGGTATTACTATGATAGTGCTACGGGTGTACATCAAGGTAATTGACCCTGGCTTGG
CAGGATGCAGAAGGCTTTCCCAAGGAAGCCTTACCTCAGCTGAGACCTGAAGAGAAGCAGGAGTTAGACA
GGTCAAGTTGGGGATTTGGAGGAGGTGGAGTCCCAGCAGATGGAATACTATGCATAAAGGCCTGGAAGTG
AGAAAGTCATGTCATGTTATTTCAAGGGACTAGAGGAAGCTTAGCAAACTGGAGGCAAGAAGATAGCTTC
AGCACACTATTGAAATTGTCCAGGTGAGTAATGATGATAGTGTAACTAAGTTGTGATACCTAGGTATGTG
AGCTGAACCTATGGAGAAATGTTCTAGGCTAGAGAATCTTTAATTGGATATTTAATTATCAGTATATACG
TAATTAAAACCTTGCAAGGGTTTGAAATGGTTCAGAGTAAAGTTCGTAGATGAGAAGAGGGCCTAGGAGT
GAACCCAGGAAAATGGCAAAGTTTCAGGGGTAAATAAAGAAAAATAAGCTTTCAGTGGAGACAGGGAAAT
TTGCAGTTCAGTAGATAGGAGACAGACTAGGTTCGTGTGATGTCACAGAATCCAAGGGAAGAGAGGTTTT
CAAGAAAAAGTAACATTTAGAGGTGTCAAATACTACAAAAGCATCATGAAAGATAAGACCAAAATATATC
CTATTAATTTAGCAACAAGGAAGGTATTGACAACCTTTATGCAAGTGATTTCAGTGTTGATTATGGAGAA
CTCAGTAATTACTTGGTGGTAACTAAAGAACCAAGATTGCAGTACGTTCAGGCATGATTGAGAATTGAGA
AAGTGGGGGAGCAAGTGTAAAACAATTATTTTAAGACTTTTGGCTGCGATGGGAAGAGAGAAAGGGCCAT
AGTAGCAGAAGATGGATGTAGGGGCAGGAAGAACACACTCTTAAAAGGGTAGTGACTTACACATGTTTAA
ATGGCAATGAGAAGAAGATGGTAGAGAGGGAGAGGTTGAGGATGCAGGAGAAATTAGAGATAATCAATAG
CACAGGTACTTGAGAAGGCAGAAAGATGAAATTTAGAAATTAGCTTCAGATAGGAAGGAAAGTACAGCTT
CTATTACAACATCAGGGGAGAAGGGAAGGAGGATGGGCATAGCTACTGGTAGTTTTGTAAGTTTGGTGAA
AGGTTAAGTAGGATTGTTGTATTGGATTTATTTTTTATTGAAGTGGAAGCTGCAGCTAAATGCCCAGTGA
TGAGGAAGGTGTTGGAGTCTGAGATTTAAGGTGAGTGGCAATTTGAAATAGCTGCTCTAGGATCCTATTT
AACAGAGAAAATGTTGAGTACACAATCAGTGAGCAGTTTTAAGTCCACTCTATTCTGTTTGCAGTTTCAA
GTACCTTTCATTGCTTCTAAGTTTATGAAAACTGGTTCACAATCTTCTTGTGCTTCTTATTTCTACCTCT
TTTCCTTCTGTTTTCTCACCTCCCCAGTTTAAACAGTCCCGAATTTTTTACAATTAAATATACAGCAACT
GCCATGAAATCTACTGATAAAAGATACTGCAAAATCAGTTTGGGATTGGGTTCATTAGCTTACTTATTAT
TATCAATCCTAGGCCACTAAGCAACCTTGCATAAAATGCATAAAATGAGGAGATTCTAGTGGAGGATAGT
TTTCAATTATCTCATTAATTTCAGGCCATGTGACTAGTCCAAATAGATATTATAGGCCAAGAAGAGCCTA
TCTTGAGATTTTAACTCCCAGGATAGGTTTTCTACCTGATCAAAAGAATCTAATAACTATTCAATCTCTT
CTTAAATGGTTTGGTTTTCTGTGCAAACAGTTTTACCCTTTTAGCTGATTTTCTAGGTGTTAAATTAAGA
AAATTCTCTCAGATACTTGTTCATCATGTACTAGGATCCCTGATGTGTTCAGAGTTGTCCAACTTTCAAA
GGGCTTTGCATTCAGAGTACCTAATCTAAACCCTGATATCATTCTTTTATAACAGAAAACCCCGGATTAG
ACTGGGACAGTGTCTGTCATGTTCATCACTGCATCTCCCTCAGTATTTGTAGAATGAATGAAGGGACAAT
GGCAAACTATAGTCCTACCATCACACTTTTGGTAGTGAGGAGAACTGCTGTAACTTGGAAGATTGGAGGG
GGAAAAGGTGGCTAAAACAATCATACAGTAAACTGGGCTGCTATCAAGAGAAACCATTTGTCAATTTTGG
CTTTTGTTGCCATTGCTTTTGGTGTTTTGGACATGAAGTCCTTGCCCACGCCTATGTCCTGAATGGTAAT
GCCTAGGTTTTCTTCTAGGGTTTTTATGGTTTTAGGTCTAACGTTTAAATCTTTAATCCATCTTGAATTG
ATTTTTGTATAAGGTGTAAGGAAGGGATCCAGTTTCAGCTTTCTACATATGGCTAGCCAGTTTTCCCAGC
ACCATTTATTAAATAGGGAATCCTTTCCCCATTGCTTGTTTTTCTCAGGTTTGTCAAAGATCAGATAGTT
GTAGATATGCGGCATTATTTCTGAGGGCTCTGTTCTGTTCCATTGATCTATATCTCTGTTTTGGTACCAG
TACCATGCTGTTTTGGTTACTGTAGCCTTGTAGTATAGTTTGAAGTCAGGTAGTGTGATGCCTCCAGCTT
TGTTCTTTTGGCTTAGGATTGACTTGGCGATGCGGGCTCTTTTTTGGTTCCATATGAACTTTAAAGTAGT
TTTTTCCAATTCTGTGAAGAAAGTCATTGGTAGCTTGATGGGGATGGCATTGAATCTGTAAATTACCTTG
GGCAGTATGGCCATTTTCACGATATTGATTCTTCCTACCCATGAGCATGGAATATTCTTCCATTTGTTTG
TGTCCTCTTTTATTTCCTTGAGCAGTGGTTTGTAGTTCTCCTTGAAGAGGTCCTTCACATCCCTTGTAAG
TTGGATTCCTAGGTATTTTATTCTCTTTGAAGCAATTGTGAATGGGAGTTCACTCATGATTTGGCTCTCT
GTTTGTCTGTTGTTGGTGTATAAGAATGCTTGTGATTTTAGTACATTGATTTTGTATCCTGAGACTTTGC
TGAAGTTGCTTATCAGCTTAAGGAGATTTTGGGCTGAGACGATGGGGTTTTCTAGATAAACAATCATGTC
GTCTGCAAACAGGGACAATTTGACTTCCTCTTTTCCTAATTGAATACCCTTTATTTCCTTCTCCTGCCTG
ATTGCCCTGGCCAGAACTTCCAACACTATGTTGAATAGGAGTGGTGAGAGAGGGCATCCCTGTCTTGTGC
CAGTTTTTAAAGGGAATGCTTCCAGTTTTTGCCCATTCAGTATGATATTGGCTGTGGGTTTGTCATAGAT
AGCTCTTATTATTTTGAAATACGTCCCATCAATACCTAATTTATTGAGAGTTTTTAGCATGAAGGGTTGT
TGAATTTTGTCAAAGGCTTTTTCTGCATCTATTGAGATAATCATGTGGTTTTTGTCTTTGGCTCTGTTTA
TATGCTGGATTACATTTATTGATTTGCGTATATTGAACCAGCCTTGCATCCCAGGGATGAAGCCCACTTG
ATCATGGTGGATAAGCTTTTTGATGTGCTGCTGGATTCGGTTTGCCAGTATTTTATTGAGGAGTTTTGCA
TCAATGTTCATCAAGGATATTGGTCTAAAATTCTCTTTTTTGGTTGTGTCTCTGCCCGGCTTTGGTATCA
GAATGATGCTGGCCTCATAAAATGAGTTAGGGAGGATTCCCTCTTTTTCTATTGATTGGAATAGTTTCAG
AAGGAATGGTACCAGTTCCTCCTTGTACCTCTGGTAGAATTCGGCTGTGAATCCATCTGGTCCTGGACTC
TTTTTGGTTGGTAAAATATTGATTATTGCCACAATTTCAGAGCCTGTTATTGGTCTATTCAGAGATTCAA
CTTCTTCCTGGTTTAGTCTTGGGAGAGTGTATGTGTCGAGGAATGTATCCATTTCTTCTAGATTTTCTAG
TTTATTTGCATAGAGGTGTTTGTAGTATTCTCTGATGGTAGTTTGTATTTCTGTGGGATCGGTGGTGATA
TCCCCTTTATCATTTTTTATTGTGTCTATTTGATTCTTCTCTCTTTTTTTCTTTATTAGTCTTGCTAGCG
GTCTATCAATTTTGTTGATCCTTTCAAAAAACCAGCTCCTGGATTCATTGATTTTTTGAAGGGTTTTTTG
TGTCTCTATTTCCTTCAGTTCTGCTCTGATTTTAGTTATTTCTTGCCTTCTGCTAGCTTTTGAATGTGTT
TGCTCTTGCTTTTCTAGTTCTTTTAATTGTGATGTTAGGGTGTCAATTTTGGATCTTTCCTGCTTTCTCT
TGTAGGCATTTAGTGCTATAAATTTCCCTCTACACACTGCTTTGAATGCGTCCCAGAGATTCTGGTATGT
GGTGTCTTTGTTCTCGTTGGTTTCAAAGAACATCTTTATTTCTGCCTTCATTTCGTTATGTACCCAGTAG
TCATTCAGGAGCAGGTTGTTCAGTTTCCATGTAGTTGAGCGGCTTTGAGTGAGATTCTTAATCCTGAGTT
CTAGTTTGATTGCACTGTGGTCTGAGAGATAGTTTGTTATAATTTCTGTTCTTTTACATTTGCTGAGGAG
AGCTTTACTTCCAAGTATGTGGTCAATTTTGGAATAGGTGTGGTGTGGTGCTGAAAAAAATGTATATTCT
GTTGATTTGGGGTGGAGAGTTCTGTAGATGTCTATTAGGTCTCCTTGGTGCAGAGCTGAGTTCAATTCCT
GGGTATCCTTGTTGACTTTCTGTCTCGTTGATCTGTCTAATGTTGACAGTGGGGTGTTAAAGTCTCCCAT
TATTAATGTGTGGGAGTCTAAGTCTCTTTGTAGGTCACTCAGGACTTGCTTTATGAATCTGGGTGCTCCT
GTATTGGGTGCATAAATATTTAGGATAGTTAGCTCCTCTTGTTGAATTGATCCCTTTACCATTATGTAAT
GGCCTTCTTTGTCTCTTTTGATCTTTGTTGGTTTAAAGTCTGTTTTATCAGAGACTAGGATTGCAACCCC
TGCCTTTTTTTGTTTTCCATTTGCTTGGTAGATCTTCCTCCATCCTTTTATTTTGAGCCTATGTGTGTCT
CTGCACGTGAGATGGGTTTCCTGAATACAGCACACTGATGGGTCTTGACTCTTTATCCAACTTGCCAGTC
TGTGTCTTTTAATTGCAGAATTTAGTCCATTTATATTTAAAGTTAATATTGTTATGTGTGAATTTGATCC
TGTCATTATGATGTTAGCTGGTGATTTTGCTCATTAGTTGATGCAGTTTCTTCCTAGTCTCGATGGTCTT
TACATTTTGGCATGATTTTGCAGCGGCTGGTACCGGTTGTTCCTTTCCATGTTTAGCGCTTCCTTCAGGA
GCTCTTTTAGGGCAGGCCTGGTGGTGACAAAATCTCTCAGCATTTGCTTGTCTATAAAGTATTTTATTTC
TCCTTCACTTATGAAGCTTAGTTTGGCTGGATATGAAATTCTGGGTTGAAAATTCTTTTCTTTAAGAATG
TTGAATATTGGCCCCCACTCTCTTCTGGCTTGTAGGGTTTCTGCCGAGAGATCCGCTGTTAGTCTGATGG
GCTTTCCTTTGAGGGTAACTCGACCTTTCTCTCTGGCTGCCCTTAACATTTTTTCCTTCATTTCAACTTG
GTGAATCTGACAATTATGTGTCTTGGAGTTGCTCTTCTCGAGGAGTATCTTTGTGGCGTTCTCTGTATTT
CCTGAATCTGAACGTTGGCCTGCCTTACTAGATTGGGGAAGTTCTCCTGGATAATATCCTGCAGAGTGTT
TTCCAACTTGGTTCCATTCTCCACATCACTTTCAGGTACACCAATCAGACGTAGATTTGGTCTTTTCACA
TAGTCCCATATTTCTTGGAGGCTTTGCTCATTTCTTTTTATTCTTTTTTCTCTAAACTTCCCTTCTCGCT
TCATTTCATTCATTTCATCTTCCATTGCTGATACCCTTTCTTCCAGTTGATCGCATCGGCTCCTGAGGCT
TCTGCATTCTTCACGTAGTTCTCGAGCCTTGGTTTTCAGCTCCATCAGCTCCTTTAAGCACTTCTCTGTA
TTCGTTATTCTAGTTATACATTCTTCTAAATTTTTTTCAAAGTTTTTCAAAAGCAATGGCAACAAAAGCC
AAAATTGACAAATGGGATCTAATTAAACTCAAGAGCTTCTGCACAGCAAAAGAAACTACCATCAGAGTGA
ACAGGCAACCTACAACATGGGAGAAAATTTCCGCAACCTACTCATCTGACAAAGGGCTAATATCCAGAAT
CTACAATGAACTCAAACAAATTTACAAGAAAAAAACAAACAACCCCATCAAAAAGTGGGCGAAGGACATG
AACAGACACTTCTCAAAAGAAGACATTTATGCAGCCAAAAAACACATGAAGAAATGCTCATCATCACTGG
CCATCAGAGAAATGCAAATCAAAACCACTATGAGATATCATCTCACACCAGTTAGAATGGCAATCATTAA
AAAGTCAGGAAACAACAGGTGCTGGAGAGGATGTGGAGAAATAGGAACACTCTTACACTGTTGGTGGGAC
TGTAAACTAGTTCAACCATTGTGGAAGTCAGTGTGGCGATTCCTCAGGGATCTAGAACTAGAAATACCAT
TTGACCCAGCCATCCCATTACTGGGTATATACCCAAAGGACTATAAATCATGCTGCTATAAAGACACATG
CACACGTATGTTTATTGCGGCACTATTCACAATAGCAAAGACTTGGAACCAACCCAAATGTCCAACAATG
ATAGACTGGATTAAGAAAATGTGGCACATATCCACCATGGAATACTATGCAGCCATAAAAAATGATGAGT
TCATGTCCGTTGTAGGGACATGGATGAAATTGGAAACCATCATTCTCAGTAAACTATCGCAAGAACAAAA
AACCAAACACCGCATATTCTCACTCATAGGTGGGAATTGAACAATGAGATCACATGGACACAGGAAGGGG
AATATCACACTCTGGGGACTGTGGTGGGGTCGGGGGAGGGGGGAGGGATAGCATTGGGAGATATACCTAA
TGCTAGATGACACGTTAGTGGGTGCAGCGCACCAGCATGGCACATGTATACATATGTAACTAACCTGCAC
AATGTGCACATGTACCCTAAAACTTAGAGTATAATAAAAAAAAAAAAAAAATTAAAAAAAAAAAAAAAAA
AAAAAGAGAAACCAGTGCTCTATTATCTAGGTATATACCAAGGTTACCCACTGCTTGACTCTCATTATTA
GCCTTCTTTGATGTTCTCTGGTACTTGATGTCTTTCATAACTAATCAATGTATTAATGTATCCAATCATT
TACTCGATAACTTTATTGAAAGCAAAAGCAGTTGCATACCAGCTATCAAGCTGGAAGTGGGAGATACAGC
CGCAGACAAGGCAGATATGGTCCCAGCCCTTAGGAGCTCCCAGAGTAGCAGGAGGTTTCCCCTTCCAGTG
TCTTCTCTCTGCTTTTCTTCAAAAGGAAAAGGCTGATGTGTATAATATACCATATCTCTTTGAAGTTCTC
TGATTATGGATTTTAGGTTTAAACCAGTTCTTCATCCATGACTTTATAAATTGAAAATCCAGGATTTTGC
TGTGTTGTTGTGTTCTTGTTTTGTTTTGATGTCCCTGTTTTCTCTAGATACAGTTAGAAATGTCTAGGAA
GAAATTTTTGGTTAGTATGGGAGCCCCACAAAGCCATTTTTTTAAACATAAAATCTGTATTACATATCAG
GTATGAAATACAGGGGGAATGAATCATTTCTCCGTAAAGGAAAATTTAAAGTAAATTTCAGGAAAGTGAA
TTCTTTCCCGTTTGCATTACCGACAGATGCAGAAACTTTAATCGTCATTTGCTAAGAGGGATATGGCAGA
TAATACACAATAGATGTCGTAGCAACATTCACTCGCATTCTTTTTTTTTTTTTTTAAAGAAATCTTTCTT
TCAAGAAGCTATTCTAGGATCTTTCTCATGACAGTGTCCTAGTTCTTATCTTTGCTACACACAGGCTCAC
AAAGTGTTTTCTTTGAAGGGCATTTTGTTATTGGCCCTCTTTTCATTTTTCTTTTCCGTAGCAAACAGAA
CCGAAGGTGTTTACTCCCCACGGTGAGAGGGCACCTGGGTGCACAAACAGTGGTGTGAACCACTGGCCTT
TCTCTGCTTTCCGTTCCCTGAATGTAAGAAACAGGTGCAGTGATCAATTCACTGCGTGCAGTGAACCCCA
GGCAGAAAGAGAACGTCGTGTCACAGACCTTTTGTTACTTGGAGAGAATGAGCGGGAAGAAAGGCTGCCT
CTGCTGCTACTGAGACCCTTTTGCCCATTTTATTGACTGCTATAGGTTCATCTATCCTAATTTGTCTCCG
GCTGTCCCAGTTTATCCCTGTTATTCTTGTGTTACTTTACTTTACTATATTTTATTTTATTTTATTTTAT
TTATTTTAGAGACAGAGTCTTGCTCTGTCACCCAGGCTGGAGTGGAGTGGCATGATCATAGCTCACTGCA
GCCTCAAACTCCTGAGCTCAAGCAATCCTCCTCCTTCAGCCTACTGAGTAGCCAGGATTATAGCTGTGCA
CCACTATGCCCACCTAATTTTTTTTTTTTTTGAAATGGAGTCTCGCTCTGTCACCCAAGCTGCAGTGCAG
TGGTGCGATCTCGGCTCACTGCAACCTCCACCTCCCGGGTTCAAGCGATTCTCCTGCCTCAGCCTCCTGA
GTAGCTGGGATTACAGGTGCCCACCACCATGCCCTGCTAATTTTTGTATTTTTAGTAGAGACAGAGTTTC
GCCATGTTGGCCAGGCTGTTCTCAAACTCCTTTAACTGTTTTTTTATTTTTATTTTTAATTTTTAAAACA
TATTGTAGAGATAAGAGTCATGCTACATTGCCCAGGCTGATCTCAAACTCCTGGCTTCAAGCAATACTCC
TACCTCGGCCTCCCAAAGCACCTGGATTACAGGCATGAGCCAGTGTGCCTGACCCTGTGTGATTATTATT
AGCATCCTGGACACTCTCAAAAGTGTTCAGGTTTGGACAATGAACTATAGGATCACCCTAATTACATGAG
ATTAAGAGTAGAGACCTTGACCACCAGAAATGGTCAATACTCACCATATATTTTCTTCCTGATGTTAGAA
CCTGGTACTTTTGGGAAATGAAATTGTACATGAGATATATGCAGAATGGGCGAAGGGAGCGAAAAGATTT
AAAAAATTAAGCTCGATTTATTGAGCGCCTCGAGTGCGCTCAGTGCTGTTCCAAGTGCTGACAGCAGAGA
GGTAAGTTCTGTTCTCCAGTGTTCACCTCACACGTGCAAGCCAGGTTTGAAAACACACTGTCTTTCCTTA
GTATCCCTCCACCCCTCCATGTGACTATACGTATGTATCAAGTTTGTGATATTTCACTTCTGGGCTTCTT
TTCATTTGGAAATTTAATGTCAGTGTATCATGTTTTAATTAATAGGACATCATGTTATGAAACTGTTGAA
TCGAATATTTTCCCTAGGCATCAAATTACTTGTCAGTGGAAATTTGACATCTAGATATGAGGGACAAAAG
AGATGAGAAAAATAATAGTAAAGTGTTCCTAAAGGATGCTGGTATACTGTTTAGGTATTTTAATGCACTG
TTACAACCTAAAGTGTCTTGTAAAGTATGTTCTTTAGAAATAAAATAAATAAAACAAGACATCTCTCCAT
AGGTACAAATCCACTTGCCTTCCTCAATTCCTATCCTTCTGTGATGGGAAATCTCTGCTGTGACAAAGAA
CCATGTTAAGAAAACCATAAAGTTGTATTGTTTGTAGATTTTTTTAATGACTAAAGGAAGATATTGCAAG
TAGTAGAAACAAATAGAGGAGGTGGCCCTGAAGGTCAATATAACGGAGTTCACTGCAGAAAAGAGAAACT
ACTCTAGGTACGTTAGACACATATCAAAGTTTTGGAAAGGCTAAAGTAGCAGGTTTTAGACTTGGCTTCG
AGGACAGATTTCTAAAACTATATAGAACTGATCCAATAAGAAACTACCATCTCCGGGGTACCACTGAAGC
AATGATTTCAAGAACATACTTTGTAAATAGGAACTAGGAACCAGGAGGTTGAAATCTAGACGCTACCACT
TTTGAAGCTGCTGTTAGCAACTGCCCTTCTCCAGCCAGGAAGCTGGAGAAAGAACTTTGGAACTCTGATG
TAGGAAATCTCATGTTTCTTTGACTAAGCTCGCCAACAGAAATAGCCAAAAGGGGCAGAAAGGTGACCTA
TGCCTCACTTCCACTTTCCAGATCTCTCACAAGTATACACATTTGGCAAAACGTTGCCAGATTTAGCAAA
TAAAAATAATGCATGCAACATACTTAACACTAAATAAAAAAAGATTGTGTAGAAAATTTAAATTTAACTG
GGTGCCTTGTATTTTATCTGACAACCCTAACTTATTATATCCTAATTCATAATCAGAACACTAGCTGCAT
GGAAGTCTGGCAAATACAGTTTTTAATTTCCAACCTGTCCAACTGGAAGGATGGTAAGTAGATTTAGGTG
AGCCAGTTCACAGTATTAACCAAAGTAGATTGCCTACCAAGAATAGCTAAAGCCTTTCTGCCCCCAGACG
CTTATGCTACCATCTGAATATTTTTACTTTGCATTCTTATATTCTTGGAAATCCTATCAATCTGTGATTC
AGATTGGTTTGGTTTAACTCAGCTTCCCCTTTTTTTTGGAGACAGGGTCATACCCTGTCACCCAGGCTGG
AGTGCAGTGGCACAATCATGGCTCACTGCAACTTCGACATCCCTGGGCTCAGGTGATCCTCCCTCCCACC
TCAGCCTCCCAAGTGGCTGGGACTACAGGCACGTGCCACCACACCCCGCTACTTTTTGTATTTTCTGTAG
AAACAGAGTTTCGCCACATTGCCTAAGCTGGTCTCAGATTCCTGGGCTGAAGTGATCCACCCACCTTGGC
CTGACAACGTGCTGGAATTACAGATGTGAGCCACCATGCCCAGCCCCTCTTTTTAAAATATAAAAATCTC
CCAGAATGTGAAAGTTGTCAGTCTATACTTTGGGAATAAGATTTTCAACAGATAGAAGAGAATGAGGATT
AAAACATAAGGAAGTTTGGGAGTAGAAAATATGGGCACCAGAAGGTGGAAGGAGAGAGCAGATGCCCATT
TATATATCTCCTTTGTTGGGTGTTGGACAAATCCAGGTCTTAAAATAGGAAGTATTTCTTTTCCGTACTT
CTTGAATCTTTCATATCCCAAAAGATGCATATTTCCCAAATCATATAACCCAAAGTCATGCTATCAAAAT
GATATAAATCATCCATGGTATAGGTTAAATAGCTATATATGTATATGCTGGTCTGAGACATGTATATGAC
TATTGTGTCCATGGAAATTTGAGTTTGGGGTTCTGGACCATTTATTTGCAAGTGATTTTTGGTTAGAGAA
CTCTTTGTAAGTTGGGGATTGCTTTTACTTATTTTATGAGTAAAGATGTCAAAAGGATGACTGCTAAATT
TGCACTGTGTTAATTCACTATTTAGTGAGAAGAAATATTAGACTAGCTATGAAAAGTAAAACTGCCTCTC
CAAAAAGTCAAAGCTGATGAAAAACAGTCATACAAGCACAATGCCGCTCTTCGGAAACATGGAAACACTT
TTTCCTTCCCAATTTTCCCTCAGATTTTCTCTTCCGCATTTAAAACACTTGGGTGGTTCAAGTTTCTAGG
CTACCACTGATTGTAACAGCAAACAGTAGCAACTGGAAGCAGTGGGATGTTGGGAGAAGTAATAGAGGTA
GCTGCTACCCAAGTTATCCTGGAGGATTTTCCATGGCAATGAAATCAGGTAGTAGAAGCTTGGCTAACTG
AGTGTAAGCAAACAGTTCTACTGAGAATGGTGTTGTCTTTTCAATCCGTTTATCTGTGATGGTGATAGTG
TGAAACAGGGGAATTTTATCCAAGGTTTAAGGAAGGTTATTTGGTTAAAAGAGGATATTGTTACAGTGAA
GTCAAACTTTCCATTAACTTTTTGCTGTAACAACAGATTGAACGTAGCATTTCACCGTCAACGAGTAAAG
TGAAATTTACAGATTAACTTATGTGCCTCTTTTAAAATATATCAGATTTCTAAATTGCTTTTATTTCAGA
GGTATGGGAGGTTCACTTTCTCTTTGAAAGTGTACATTATTTTTCTAGTGTCTTACATCTGCCTACAAAG
ATGTTATTTTACTTGAAAGCACAGTAACTATTTGATGAGAATTTGTCAGCATCAGTAAATTAAAGACCCT
CAAATGATTTCTACTAATTATAGTTTAATTCCGTACATTTAATGATATTTTAAAACACATGAGTTATTTC
ATAACTCCCAACATCACAAGGATAAATTTTATTCTACAAACAAAATATTGTGCTAAATGAAATAGTTCAT
TTAGGCAAAGAAAGGAGCACAGAAAATTAGTGGAACTCTCTGCTGTAAGTAACGTAGACATTACATGGCA
TATTGAGTCTCCATGAATATTGTCATGTTATGTTTTAAAAAGGTGATCGAACATATGGCATTTAAAAGTT
CCAAGTCCTCTTTTAAATGCTTCAGAATCTATTATTTAATGATCATCTTGGATCTCAAAACTGATCTTTT
GAAAGATTTTATTCGCCCCATGTGTTAATATGATTTCCCTGTCATATGATATGATTATCTATCAATACTT
AAAACCAGCAGCCAAGTAAAAAATCAGTTCATATCATTTAATGAATACTATGAGTCAGGATCTGGGTAGG
CAAGCTATTTTCGGGTTTGAGTAGTTCCAAAGCTTAAAAATCTTATATTGATTTTACAGTGAAGAAGAAA
TAGTCTTAGCTACTTTGGAGGTTTCAAACATTGACTACTCAAGGAGTATTTCCTTGCTTTCTCAGGCACC
AGGCAGTTTTTCAGGAGCAAGCATTCATCCATTCAGGGAATTGTAACCTGTAGTTTCCACTTTTCTAGCA
ATCACACTTAAAACCATGAGAGTAGGCCATAGGACATAAGGAGCTCAGCTTCTCAGGGCAAGCACATCCT
TTCAGCTTTCACCTGTCCGTTTGTTAGTGTTCACTTCCGTGCTCAAGGAGTTTCTTGTTGCCTCTGAGTT
CTAAGAGACAGAACGAAGGGAGAAGGGTGCAGAAGTCTAACGCATGTTCATGGACTTATCTCTCCAATAA
AGAGCTTGTTTTATCTTCTTTTATTTATTTATTTTTTCTAATGAAGCCATTAGCCTCAAACAAAGCCATG
GAATCTTATCAGAGTGAAACCGGGGTCATTCCATAGGCTGGCTGAGTGAGAGCTCCATGGCACGATGATG
TATGGTCACTGCACAACAACGCCTTTGCCACAACACATGTGCCTTTTAATTACACTTTAAATCTCATTTG
AAGAGATGTTATCATTATGGAAATTGCTCTGTAAATGTGCCCAGGATGAGACCCAATAAAAGTTTGCTGA
GAAGAATTGAAGACAGAGGAGATGAATCAGCAGCTAAAACATTACCATCAGACAGAATTTTCTTGGCTGT
AGGCAAAACAGCCCATGCAATAACAGAAAATCTTCATTGACTCAGAGGCGTATTTTCCCTAGATTATTAT
GGGGCACTCCTGCCTGTAGCACTATCACTTCTTTGATAAGCTGAAGGAAGCGTTCTGCTCTCCAGCTCAG
CGGGCCTTTTTCTCCCCAACCTCAGAGCCATCATTTGAATTTATAGTTGCCAAAATGAATAATACAGTAT
TGCCCTTGTGTTCCTGACTTCATGCATGCATGCAGAGCGGGGTTAAGGTTCTTTAAATGAAAGATTGCCT
TCTATTCATGCAATAAAGAACACCTCTGCTTCCTTTCCAGGGTCATTTAAAAATAACTATACCGCTGGGC
TATGGAAAGCACATAAGAAAGATTCTTAGGGTAAAGTCAAAATGCTCTTTTCTCTACAACAGGCATTGTC
TCATATCTTTGTGTAGCACAGCTGATTTGAAGTTTTCTTTTAAGCACATTCTTAATTATCTTTTCCTTTG
ATCTTGAACTGTTTCCCTGGGCTACCAGACAGAGAGCCTAGAGCCCTACCTCCGCTTTCCCCGAGGTGCA
AACTGCTCCGTCCTTCCACAGGCAGGCCCCTGGCTGAATGCACCCTTTTCTCCATGGTTACCCACCCACC
TCTCTGTTATTTGTTACTTCCCAAGTGAATGGCAGGTTAAAATGGGAAAAGGTCAGGTTATCTGAATGTG
GTTAGAGTGAAATGAATTTCCTCATTGCACCCAAGAACTGTCCTTTGACAGGTCTCCTTCCCCAAATCGG
GTCATTTTGTACGTAGGCTCACTGGGAGTAATTCTAAGACAACTAAATAAGTAAAATCACATTTTGGTGC
CATTTTCCAATGTATTCTTCTTCTTGGGGGTTCTCCTTTAAAATGGTACTGGAAGGATACGTTGTCTTCA
TTAATCCATTGTATGTCCCGGGGGTGGAGGTGGAGGTGGCAGTAGCAGAAGCCCGTGAAGTAATAGGTCG
TATTTTGTGTTTATAAATATTTCTGCAGGTTTTTGAGGAGAAGATCCATCATTCTTATAAAGGCATTCAT
GACCTCCAGAAGATTAAGGGCTGTTATGCTAGAACAGTGTTTCATTCTTAAAATGGGGTCTCTGGACTAG
CAGTATCGGCATCACTTGGGAACTTCTAAGAAATGCAAATTCTTGAGTTCTACCCCAGACATACAGAATC
ATGATCTCTCAGAGTGGAGCCCAGCAGCCTGTGTTTTAATGAGCCCTCTGGGTGATTCTCAAGCCCACTC
AAGTTTGAGAACCACTGTACTAAGGGAACTACTGATGCATGATGCAAGTTCACGCTCACAGGCACGTGTG
AATGACACAAAGAACACAGACGCCTGAGAGAGCAAGAAAGACAACATAGACTGTCTGACTCCCTGCTGGG
CCCTTCTTTACCGCCCCTATTTCAGGCTACCATGCCCATGAGTGGATGACACGTACCCCCCGACAAAGGT
CAACACCACTCTCCCTTCCACACCCTATCACTAAGTGACAGGCTAAGCCTATGTTAAACTGCTCACATCT
CCTTGGAAATTCAACACTTTAATAATAGGTAGCATTATCACCCCCATCTTCTTCTCTAAGCCAGAAACCC
AACTTGCCTCCCTATATGTTATCCTTGCATTCAGTCAGTCTCTAAGTTGTATTCATGATCTCTCAAAAAT
ATCTCCCTTTTTCTCATCCTGTGTCTATTACCTCAGTTTAGATCTCCATATTCTCTTGCCTCTAATGTTC
TTGCCTCTAATGTACCTTTTCACTGCCACCAAGATGATGTTACCAAAAAATCTTAAACAGATTAGACATC
TTCACAGGATAAAGTCCAAACCCTTAGCTTGATACACAAGCCCCTTCACAATCCAGGCCCTCCTTCCTGT
GCAGCTATATATATATATATATATATATAGAGAGAGAGAGAGAGAGAGAGAGAGAGAGAGAGAGAGAAAT
TTTGATCTTACCACTCTGTCTCTCTTCCCGCCATGGGTCTTCCCCTCTTCCCTCCGGAGTTACTTAGCTC
TGATGTGTATTCTTATCTCGTCTTATCTTCAACTTCATTCATGTTTTTCCCACTGCTTCAAATTTCACTC
TCCCACTTCTCCCCTGGCCAGCTGCTACTCATCCCTCAAGACCCTGATCAAATATCATCACTTGTATGAT
GGCATCTGCAAATCTTGGGGGGCAAGGCTAATTGTTCTTTGTTCCCACAGGGCTGTGTTCCAGTTTAACA
TGATCACATGTTATTTTGGTTCATTTATTTGCTTAAGACTTTTTCAGAAGGCTATGGGCTCTTTAAAATA
GAGAACTTACATCTTGTAGTTTTAAGAGTATTTTTAGTAAAAGTTTAGAGTGACCCCCATCTTTCTGCCA
GCCCACAAAAGGAAAACATCAAAAAGTGAATGTGTAAAAGGAAGAGAACTCTGACAAAACCAGGCAGAAA
GGTTTTTCAGCAAGTCTTTTTATTTTCTGTTCAGGATAACATTAATAATTATCCACGTTGGTTTCTCATT
CTCCTGTTGGTGAATATTTTTCTGCTAAATTTAAAACCGTATCACAAACTCAAGCAGAGATTTACAACAT
TTCAACAGCTTTTCTACCCCTGCCTTAGAAGGGTGGATCAAAAACATTTGTCCATGGTAAAGCACTATGG
ACATGACTTAGTTAACAATTCTCTGTTTGGGTCACCATGAGGCTTCTTCGTTTATACTCAGGGTCAGCGA
CAATGCTGATATGCAGCTACAATTTCTCATTTCTTACTCAGGGTGTTATGAAGCAGATTTCCACTGTTCT
TTAATCGTTATTAAAATGTAGTCCAGGTGCAGTGGCTCACGCCTATAATCCCAGCACTTTGGGAAGCTGA
GGCAGGTGGGTCACATAAGGTTAGGAGTTCGACACCAGCCTGGCCAACATGGTGAAACCCTGTCTCTACT
AAAAATAAAAAAACTGGCCGGGCATGGTGGCAGGTGCCTGTAATCCCAGCTACTCAGGAGGCTGAGGCAG
GAGAATCGCTTGAACCCAGGAGGGGGACAGAGGTTGCAGTGAGCCGAGATCACACCATTGCACTCCAGCC
TGGGCGACAAGAGCAAAACTCTGTCTCAAAAAAAAAAAAAAGTCATTCTCATGTAAAAATTCTTGTAAAA
TAATCTGTAAAGTCATCCTCTTATCTGTTCTAGTTCTTCATAAGACTTATATAACATGTCATATGGGCAT
GGAAAGGCCTAAGCCTTCCCAAACCTTGCTCTTTTGGGGATGATTTTCCAAATGTACTTGTTCTCAGTTG
AAAAGAGCATTGCGGCCGGGCGCGGTGGCTCAACGCCTGTAATCCCAGCACTTTGGGAGGCTGAGGTGGG
CAGATCACGAGGTCAGGAGATCGAGACCATCCTGGCTAACATGGTGACACCCCGTATCTACTTAAAATAC
AAAAAATTAGCCGGGCGTGGTGGCGGGCGCCTGTAGTCCCAGCTACTTGGGAGGCTGAGGCAGGAGAATG
GCGTGAACCCGGGAGGTGGAGCTTGCAGTGAGCCGAGATCGCGCCACTGCACTCCAGCCTGGGCAACAGA
GCAAGACTCCGTCTCAAAAAAAAAGAAGAAGAAAAGAACATTGCATCATGGCACAAGGACACAAAAAATA
CCCTGGACCTGCTTCAGTGAGATGGTCTAAGGGTCTCTAGCATCTTCTGAACTGAACTGAATGCTTTGGG
AAGAATTAATAGATACACGATGTATATTAGTTCGTTTCACACTGCTATAAAGAACTTCCCTGAGACTGGG
GTAATTTATTTAAAGAAAAAGAGGTTTAGTTGACTCACAGTTCTGTGTGGCTGGGGAGGCCTCAGGAAAC
TTATAATCATGGTGGAAAGCAAAGGGGAAGGAAGCACCTTCACAAGGCAGCAGGAGAGAGAGAGAAAGAG
TGAATGGGAAGAGCCCCTTATAAAACCATCAAATCTCATGAGAACTCACTCACTATCACATGGGAAAACA
GCATGGGGGAAGCCACCCCCATGATCCAATCACCTCCCACCAGGTTCCCCCGGATTACAGTTCTAGATGA
GATTTGGGTGAGGACACAAAGCCAAACCATATCACAATGGAAAGCTCATGAATGGGTTCTAAGAATGAGG
AAATGTACCTTAGCATTTTGCCTACTTTTCCTTTATGACATTTTTTTCCCGGCAAATATGCCAAATATTA
CCTACCTTTACATCAGTGTCCACATGCATATCCCCTGTCTTCCTCCTTTTCCTCATACATTAACAAAAGA
GTAACTTTGTTTTCTCCCCATCACTGTTCACCCTATTGTATAAGAGAAGAAAAGCAAAATAGGATGAAAG
AACTATCTAGGCACACACACAAAAGTCACACTCTCCAGAAGAAAGAATTTGCTCTACTTGGTAGTAGACA
GAAATTAACTCACTGAAGATCACCAGAGAATCAGATCCAATTATATCAGCAGGACTTTAGTTTACATCAT
GGTACTAGAACCTTCTTTAACATTCAAAACTTATGAATACCTAGAAATAGTTTTAAGGTTAATATCTCTA
TGCTGTGGGCTAAAGAGTACCCACAAATGAATACAGTTGTGTCTGATGAGTGTCTGTGATTATTTTGGAA
ATTGTCCTGCTATTTAAAATGAAAAAAATAGAAATGTCTTAGATTTTCCTATCATTAACCTATTGTAAAC
AATTACATCAGTGTAGGGTTGTTTTGTGGTTGCGTGGGAGTATTTTGAGGTTTTTAGGGGGTAAAGTGGG
GGATAGAATGAAGTTGTTGTTTGCATTTACAACCCTAATAATTAAAACAAGCCAGAGGGAATTACCTACA
TGGCTGTTGTGATTTCTAGTGTATGATCAAAAATAATTATGGCACTTTGCCATATGTTCTTGCTTTCTTC
TTAGATATGTGTTATTGGGAAAAGATGAGACTTGACATCAACTAATTGCTTTTTTCTAATATACAACCTT
GAACCACAGTGATTCTCTGGAGGACAAAAAATAGCTTAGTGACAAAGAGATTCCAGAAATAAGAGCTTTT
CGAGCTTTTAACTCTCTATGTAATATAGACAAATTGCACAGATTAATATAACCAAATATGTATTGGTCCA
TGGGAAGAGAGTTACCTATTTGAAGAATAGGAGTGTATTGTGTTCATTTAGAACCATTCAGAAACATCAA
TGATATTAGTTCTGAGTTGACTAAGGATAAATTTTTAAAAGCAATACCTAATTGGAAAATTATTCAGTTG
TTGACCATTCCTATCAGTGCTCTGAAACTAAATATCTCACAGATGCCTTAATGAGTTATTATAATTATGT
TGCTGTGATACATGTAGCCCAAGTCAGAAGTCACTTGCTTTGTATTTAATGGATGGGGAAGACACTGGAG
CTTGGAGGGAAGAGAATAAAAATAACCTAGTTTCAGGAAGATCTATGCTCTAACCCTGCTTCTGCCACAT
AACAACAACTCTATGATTTGTATAAGTTACTTTACCTCTCAAACTCGTGGTTTCCTCGATAGGGGATAAA
GAAGGCCTATTTCATAGAGTTGGTGTAAAGGATTTATAAGGGCTGTAAGTATTAGTTCCTGCCCTGTTTC
ATCCCCCTACCCTACCCCCACCCCTCATCATGGCTCTGCAAAAACAAATATGTCTCAGAGTTGGAAAGAC
CCATCTGGTCTTTCTCAGATAAGGGTAGTTTTCTTCAAACAGACTGATTCCTGCACATAAAATATAATAT
AAAAAACCAAAAGTACCTTCAACATTGTAGACTTTTCATATGTGGTTGTCTCTGTGACTTAAATGTACAA
TCTAGGGTTTGCATGTTAAGGTCTTTCAAGATTACTGTTGGCACTGATCTGAAAGATGTCTCATGCAGGA
AATGCTCACCCAATTATGAGCACTGAGGCTGTATAGCAATATCAGAAATAATATTGCAGCACAGTATTTT
CTATGGATTTTAGATGCAGTATTAAAAAAAGAAAACTCAGCCTGTCTTTAAGACTCGTTTTCTCTTTCAA
CACCAGAATTAAAAGGCATGCCATTCTTTTTTAAAGTTTATGTGCAGAGCCAAATGAATATCAACATTAG
TTCTCCACTGGGTCCACGGCTTCTTTTTAAAAATATCTGAAGCAGTGTTACTCTACCCACTTTTTCTCAG
GAAATTGTGTCCTTTAGAACTGGCACCCATATAGTTTAGGAATGCTTGATAGGGTATATTTTAGGTGGGA
GTCACCTGTGCCTATATGGAGCTTTGATGTCAATGCCCTTGTCATTTGGTGTCAATGGTTTTGTCATTCT
AATTTATTTGGCCCCAAGGTGTGTGTGTGTGTGTGTGTGTGTGTGTGTGTGTGTGTGTGTGTGTTTGAAA
CACAGCATATGTATTTTTTTCTTACTCCTTGAGAAATAGAACTTTAAATAACATTTCTATCTTTAAAATG
TACTTGTGAATAGTTATCACTTTCCTGAATTCTACCTTCCAAAGGTAGGACAAGAGAAGGATGGAATTAA
ATCACACATGCAGCTATTTTTATAACTTATGAGCACTCAATGATGGTAGCATCCCTCTTCTTTACCTTCT
CTCTGATTCTGAAGCCACTGCTGTTTTGGTTCCTGTATGGCTGGGACTGCCTGTCCACTAGACTTCCTGC
CTTCACTCTGACCCTGCTACATTTACCCTGAACACCATCCTCCCAATAATCATTACCAGATGCTATTTTC
ACAATGTTACACCTTTACACAAGAAGCTACAGTGGAATATTATCCTTACAGAATCAGATAAAAATCTCCA
GGCGGCATTCTAAGCTCTCATTGGCTACACTGTACCCTTTGAACCTGAACTTCCTGAGAACTACCTCTTA
GCTCCTGCCTGTAGCTCTGGCTCCCATCTTCATGCAGTAGGTATTCGTTTTCTTTTGAACGGCCTCATAT
CTTCTCTGCTAGCAGGATTGGAGTCATGGCAGAAAGTGAGAGGGGGACTAGAAGGATGCAACATTAATGA
AACCTCACAATAGGTTAGGCATTGGGTTAGGTACTTGGTTGATCTACTCACATCATCTCATCTAATCTTT
GCCAAAACCTTAAAAGGTAGGTATTATCGGCCCTACTTATAGACATACAATAGGTACTTAATGCACATTT
TTGTGATGAATAAATATTCGGGAATTTTTGCATTGTGACTGGATGAGAAGAAACTAGGAAAAACAAGACG
TAGATGAGAAAGATACCTCTCATCTTACTTCCAACCTAGGAGATCTTAAATGAACTCATCAGTTTTAAAA
GGTAATCTTAAGAATGGAGTCAGAGGGTCACACAAGGAGAGAAAGCATCACGTATTACCAGAGTTCGGGA
TTGCTTAAGGCGGTTTGACAGTTTCCTCCGGGGGTAATCCACCCTAGGCCAGGCATTTTTAAAGATTAGA
TTTTGAAATGAAGCTTTGCACTTGGGAATATACTGAGGCAAGAAAGCATATCCCTTCTCCCTGCTGAGAG
AGCATATCCCTTCTCTCTGCTGTTGCAGTGCTTAAGTGTGAGAATTTTCGAATGAGATATGAAAGCAAAG
ACAACAAACCCTGCAGGATAATAGTCTCTGAGGACTTTAATAACAGCCGTTTTTAAAGCAAAGCCTGTGG
ACTCCTAAATCCATAGCTGCTCGTTTAAGATGCAACGCAATGCAGTGGACCTGAAAACATACTCCTTATC
TACCTAGAGCAACCAGGCTCCAAGCCAAACAGCAGTCCTCAAATTAACTCTTGTTTCTCTTGGGACGACA
ACTCTGCTGCTTTTAAAGGTGTTGCGTGGCCACATATAGAATAAGAAGGGAAAAAACAGTCACACCCTCT
TGTGAGTCTGTATCCAACTGCATTTTCTGATCTGGTTAGGAACCTCCGGTGGTTAGATTAGAATCCTGAT
AAGGCCAAGACTGTGGGTCCAATTTCTTCCTATGGATTCTTCTCGAAAAACTTGTTAGGAAAGATCCACT
TCGGGTTTTTTTTTTTTTTTTTTTGCGCTTGTTTTAATTCCCAATCCATAATAGACTGATACTTTTGTAA
CATGCAATAAAAATGAATTATTTTAAAAATTACAAATACCAGACATACAAAATTTAAGCCGATGCTTTTT
ATTTTTAGATTGCTGTACACGTTTCTAAAGATTTGCTTTCAATTTCTGTTCTTATGTCTTCATAATAGAA
TATCTGTTTCTGTGTGTGTATACGTATGAGTGTATGCAAGTGTGCTCCAAAAGCTCTACTATTTAGAGCT
CATGTTTAATGAGTCATGTTGGATAACCAGTCTAAGGGAGTTCTACTTTCATATAATTGTTTTTGTTTTA
TTTTTATTTAAATCATTAACACCTTTTCAAAACAACTGTATCAAATAACAGTCATTTGGTCATTTGAAGC
ATTTACATACACTGCTTTCTTCTTAAACAGATTTTACTGAATGTAAATCTGCTTTCCCTGGCTAATTCAG
CATCATCATCCTGAGCATTAACTATTTTGCTTCGCTATAAAACGAGGTGATGCCTTCAAGGGCTACTGAT
GCATGGAGAGCTGTTAGTTTCCACACTGTGTGACCCTGGTCAATTATGCATGCCCATGGCTCCTTTTACA
CCTTTCTGATTCTCTGTAAGGTGTCACTTCTTCCTACTCTCAATTTAGCCACTTAGGATAATTTCTTTAC
TATTTTGAATTGTATGTTCCTGACCTTCTAAGTTCTTAGAAATCAGACCACTTTTTTTCCCATCAAGCTA
ATTTAAATTAGATAAAAATTATCAGTAAGGAGGAACTAATGGCCTTATAATTATTCATATACTAACTGCT
TTCAGAAAAGCTTAGAGATAATCTGTCTATAATAAAATTCTTAAGGAGATTTGGTCACTTATTGTTATTC
TTTCTACACCATTGTGTTTGTTTCCTTACTTCTCAGCTATATTAAAATGGGGAAGTTTTCATTTGCTGAG
TCCTATTTTAGAGACCAATAATTCCATTTACATAGGAAAGGAAATATGTGGATACGATTATTCATGATGT
TCTAGAATAGTATCACAACCATCTGCTTAATGGTTAATAAAATGGTTAATAATAAAAAGAAGGGTACAGC
ACTAATTCTTGACATCTCCCTTCTTTATTTTTCTTCTAGTAAAACATCCATAACTTTTCCTATTCTTCCC
CAGTTGTATTATTACTTATGAACACCATGGATCATTCTACTTTTTGAATGAAATAGTACAAATTTAATAT
TCGATAATCTTGTCTTTGTACTTTTCTTTCTAAACTTTTATTCTCGGTGGCTTCCTAAAGGAAGACTTTA
TTCTACTTGGTTTAAGCAGTTGGTCTGCATTCTACCTATTTCTCTCAACTCTCATTGTCCATTCCAATCA
GGTTGTGCAATTCATTGTCCCTGCTCATAAACCAAATTCATTTCACCTTTACTCCATTCCCATGCTATTC
TTTTTACCTGGAATATTTTCTTTTGTTCCAATTTCCCAATCGTATACATCCCTCAAGGCTCAAGCCAAGT
CCTGTAACTTCATGAAATCTATTTCTAACATCTGATTTCCACATGGATTATCTTGTAATAGTAAGCCCTG
CATTTGCTATTATTTATTAAAGATCTCTTGTGTTCTAGACGCTATTCAAAGTATTTTACAAAAATTCCAT
GTAATATTCAAAAAATTCAGCAGGTATGTATTATTATTTCATGTTTAGTGAAACCAAAGTAATGAAAGAG
TTTTCATCATTATGTGGCTAATAAGGGAAAGAGAAGAGAAGGGTCAAACCTATGTCTATTTAACTGCACT
TTGCCATGAGTTTTCTCTGGAAGCTGAGAAAGGAGATTCACAACAAGAGTAGATGAGACTCAGATAAGAA
GGAAGTGTGGAATTTGAAAAAGCCCTTCAGAAAACAGGATCTCCCCTACTCCTAAAACTGCTATACTGTG
AACATATTGCTTGTCTCATAACTGAACTTTTTTGGTACTCTCAGCTGAAATTTGCTCTATAATTGTACAG
AACTTTAGGCCAAATGTTTCTTTTATGGGGACACACATTATTTGTTTCGTTTGCACCCATTTTCTCAATT
ACTTTGTGTTTTCTCTTGTTGTATTGGATGCATCTCTATCCACTGCTACAAATCTGTTTAATAGTCTTTA
TATTAATAAGACCATGAAATTGCTCTTTGTGTGCTGACATAGTTATCCTTTATTTTCTAATGGCAGTGCT
AGATTTGCTAAAATTTAGGTAGTAGCATTATTAATAGGAAAAACTACCACCAACAACTAAACTTGAAAGG
TAATATAGCCTAGTGGCTAAGAGCACAATCCCTGAAGTCTGACTGACGAGGTTCTAAATCTTGCTGCATT
TATTAGCTGTGTGAACCTGGGCATTTTTAGTTAACCTTACAGTAGTTTCATTATCTTATATGGAAAATGA
AGATAATAGTAGCCCCTACCCTAGAGGGTTGTTGAGAGGAGAAAATGAGCTCATGTATATACAGTGCTTT
GGACAGCACCTGATGTACAGTAAGGTTCATGTATGTTGTTGTTCTTGCTGCTGCTGCTGCTGCTATGGTT
TTTGTTATGTAACAACTACCTTTTCCCCTTTGTTCATTCGTTATTGCTTTTCCTAAAGACTACAATCACA
AAAAAGAAGAAAAAAATTAGAGAGCATACAGTGAATGCAGTAATGAAGGCTTGAATGATCTTTTCTAGTT
AAGTCAGAAGTGAAATAAAACTATCCAAAAATTTCTATGAAAATTATCCTTTGTCCAGATTGGCTACCCA
CTGAGAACTCCACTTGATTCTCCATATCAATCTTTTGCTCTTTTGTGCTACCTGAGTCTGAGGTGTAGTC
TTTAAATGATGAGTTTATTGGCACAAGACAGGGATGCCCTCTCTCACCACTCCTATTCAACATAGTGTTG
GAAGTTCTGGCCAGGGCAATCAGGCAGGAGAAGGAAATAAAGGGTATTCAATTAGGAAAAGAGGAAGTCA
AATTGTCCCTGTTTGCAGACGACATGATTGTATATCTAGAAAACCCCATCGTCTCAGCCCAAAATCTCCT
TAAGCTGATAAGCAACTTCAGCAAAGTCTCAGGATACAAAATCAATGTACAAAAATCACAAGCATTCTTA
TACACCAACAACAGACAAACAGAGAGCCAAATCATGAGTGAACTCCCATTCACAATTGCTTCAAAGAGAA
TAAAATACCTAGGAATGCAACTTACAAGGGATGTGAAGGACCTCTTCAAGGAGAACTACAAACCACTGCT
CAAGGAAATAAAAGAGGACACAAACAAATGGAAGAACATTCCATGCTCATGGGTAGGAAGAATCAATATT
GTGAAAATGGCCATACTGCCCAAGGTGATTTACAGATTCAATGCCATCCCCATCAAGCTACCAATGCCTT
TCTTCACAGAATTGGAAAAAACTACTTTAAAGTTCATATGGAACCAAAAAAGAGCCCACATCGCCAAGTC
AATCCTGAGCCAAAAGAACAAAGCTGGAGGCATCACACTAGCTGACTTCAAACTATACTACAAGGCTACA
GTAACCAAAACAACATGGTACTGGTACCAAAACAGAGATATAGATCAGTGGAACAGAACAGAGCCCTCAG
AAATAATGCCGCATATCTACAACTATCTGATCTTTAACAAACCTGAGAAAAACAAGCAATGGGGAAAGGA
TTCCCTATTTAATAAATGGTGCTGGGAAAACTGGCTAGCCATATGTAGAAAGCTGAAACTGGATCCCTTC
CTTACACCTTATACAAAAATCAATTCAAGATGGATTAAAGACTTAAACGTTAGACCTAAAACCATAAAAA
CCCTAGAAGAAAACCTAGGCATTACCATTCAGGACATAGGCATGGGCAAGGACTTCATGTCTAAAACACC
AAAAGCAATGGCAACAAAAGCCAGAATTGACAAATGGGATCTAATTAAACTAAAGAGCTTCTGCACAGCA
AAAGAAACTACCATCAGAGTGAACAGGCAACCTACAACATGGGAGAAAATTTTCGCAACCTACTCATCTG
ACAAAGGGCTAATATCCAGAATCTACAATGAACTCAAACAAATGTACAAGAAAAAAACAAACAACCCCAT
CAAAAAGTGGGTGAAGGACATGAACAGACACTTCTCAAAAGAAGACATTTATGCAGCCAAAAGACACATG
AAAAAATGCTCACCATCACTGGCCATCAGAGAAATGCAAATCAAAACCACAATGAGATACCATCTCACAC
CAGTTAGAATGGCAATCATTTAAAAGTCAGGAAACAACAGGTGCTGGAGAGGATGTGGAGAAATAGGAAC
ACTTCTACACTGTTGGTGGGACTGTAAACTAGTTCAACCATTGTGGAAGTCAGTGTGGCGATTCCTCAGG
GATCTAGAACTAGAAATACCATTTGACCCAGCCATCCCATTACTGGGTATATACCCAAAGGACTATAAAT
CATGCTGCTATAAAGACACATGCACACGTATGTTTATTGCGGCACTATTCACAATAGCAAAGACTTGGAA
CCAACCCAAATGTCCAACAGTGATAGACTGGATTAAGAAAATGTGGCACATATACACCATGGAATACTAT
GCAGCCATAAAAAAAGGATGAGTTCACATCCTTTGTAGGGACATGGATGAAATTGGAAATCATTATTCTC
AGTAAACTATCACAAGAACAGAACACCAAACACCGCATATTCTCACTCATAGGTGGGAATTGAACAATGA
GAACACATGGACACAGGAAGGGGAACATCACACTCTGGGGACTGTTGTGGGGGGGGGGAGGGGGGAGGG
ATAGCATTGGGAGATATACCTAATGCTAGATGATGAGTTAGTGGGTGCAGCGCACCAGCATGGCACATGT
ATACATATGTAACTAACCTGCACGTTGTGCACATGTACCCTAAAATTTAAAGTATAATAATAATAATAAA
TAAATAAATAAATAAATAAAAAATGATGAGTTTAGACAAATATCATTATGGTAGTATTATATTATGTTAT
GTTATATTATATTATATTATATTATGTATAATGTATATTCCTTGCAGCCTGCCCTGCATTCCCAATCTAT
GACTCATGCTGCCTTATTGATACTGAAAAATCTCCACTACAGCATGCCAGCTTTTGAAAGAGAGCCTTGG
GTTCTTTCCCAATACTTACCTTCCTTTTAGGGCAACCTATCTGAGTCCTGTAGCTTGAAAGATTTCCTAC
CAGCCTGCCATCCCAAAGGAACATGGATGAACTATGTTTATGCTGATGTGTCAAGTCATTTCTTGGTATG
GTTCATAGTAGTCCACATGGCTCTTGTAGACAAAGAGATGAATTACTGATGGCAGAATTTCTGTTCTGGC
AACAGGGAAATTTGCAGAAAGGAGACCTTTTCAGTGTGAACATTTTTTGCTCACAGGTGGTCCAGGATGC
CCAATGCTAAATGAGAAGTGAAAAGAGCAATCAGGGCCAGGTGTGGTGGCTCACGCCTGTAATCCAAGCA
CTTTGGGAGGCCAAGGTGGGCGGATCACGAGGTCAGGAGATCGAGACCATCCTGGCTAACATGGTGAAAC
CCTGTTTCTACTAAAAATACAAAAAAAATTAGCCAGGCGTGGTGGCGGGCGCCTATAGTCCCAGCTACTT
GGGAGGCTGAGGCAGGAGAATGGCGTGAACCTGGGAGGCGGAGCTTGCAGTGAGCCAAGATCGCGCCACT
GTGCTCCAGCCTGGGTGACAGAGCGAGACTCTGTCTCAAAAAAAAAAAAAAAAAAAGAGCAGTCAGAATT
CAATTTTTCATTCAGAACAAATCAATCCACGTGGGTAAACATTTTATCAAACTCAAGAATGCTGTCTTTC
AGGGTGCTTTTCCCTCAACAGTCACTTATTTCCTCTTGCAAGTAGTATCTTCGTTCAGGTTCAGTGACTA
CTGTGTATTATATCCAATGCTTCTGGCAAGTGGGTTGGTGGAGGCAGCCCAAGATCTTCTAGAATCAAGA
GAATTGGATCCATTTCCCAGTTCTAACACTTATCAGCTATATGGCTTTTAGGCAAGTCAGTTAAACATCC
GAGTCTCAGTGCTCTCATCTGCAAAACAGAAAATGTGATGTACTTCACAGAGCCAGGGGGAGGAATAACT
AAGGTGGTACATTTGTACGTGCTTTGTAACCTGTAAAGCCCTTTACTGTACACGTGTCATTTACAGCTCT
GTATCACCATCATGACCTAGAAAAGCAGTACTGACAGAAGACTTATCTTCTTGCCAATGCTAAGATAACT
TTAGCCATTTCTGCATTTCTAAAGGAAGGAGTCTTTATCCCAGTATCTATGAAGACTTGGCAGGAATTGC
CGTCAATATTTAGTTGGTAATATAAACGAATTAAACAAAAATGCACACTAGGTTTTAGGAAAATTAAAGA
CAGAACTATCATTTGTACTCCTCTTACATTTCCCAAAGTGCTAAAACTAGACAATAAATCAGTCCTCAAT
AAATGCTTGTTTATCAATTTTATATTCATTTATTTGTTGATAATACAACAAAGATGTTTATATGCAGTAT
AATATATATGGCAAAGATGAAAAGTAGCAAATTCATGAATCAACATCCTATTTATGCTTGAGAAGACAAA
GAAAGTGTTGGTGACTTCATGGTATACATAACCTTAAGGAGCTCGTGATTGAGCCTGGGTCTCTGCTATC
AATGTAGGATATAAATTTCAAATGTACTATCCTTTATATGTATGTTAATGTAGTAAACATAGAAAACTGA
TGCTACTAGTGAGAATACTTTTACTTGAACAACTAAAAGTTTGTCTTTAATCCCCTAAGTGCATACACAA
AAGGAAAGTACTGTACAAATCAAGTACAACAGAAGAAGTAAAGTAAAAGACAAGTGAAGGAATTATCTGG
AACTTAGATCTGGTTGGCTTTTTCTCCTGAAGTACTTAGATAAATTAACTCACTTTTCTCTTTTGCTGAA
GAAGTGCAAATTAGGCAGGCATGTTATTCCACGTAGGCAAAAGGAAAAAAGAAAGAAAAACATAAAATGG
CTATATATTTGACCAAACTTCGTTCTGCAAGAATCCCAATACTAACCTTCTACCATATAAACTACTTTCA
AAATCAGGCTATATCCTTCCAGTACAAACCTGGTTTGTACTACTCAGAGATACTACTCAGAAATACTTTC
AGTATTTCCCTTCTTTCAACTTCTGATGTGATTCTATCCATATTCCCCTGCCTGTCTCCCAGTCAAAGAG
AATGGGACACAACTCTCTTTAGAGTCCATCAGTGATGCTTTAGCTGCCAAAAATAGTGACAATAGACATT
CATTGTCTGTCTACCTTACTTGTTCAACATTCAGAATTCTGCATCTTAAGAGGCTGTGGCTGAAAACTTG
AGCCAGTTCTTCAGAATTTCTAACATGTTATTTCTGCCACTTTTTCTCCCTTACTTTAGCAGAGTAATTT
AATTCAATTTGAGAGAGAGAGAGAAAAAAAAAACTTTTCTAGTTACACAGATCAATCCAATTGTTTGGAG
CTTCAGAATGAATTTTTAAACTTGTTGAACAGAAGCATACAAATCTCTAAGAGCAAGTCAGATAATATAC
AAAGCCTCCATTCATTGTGTAGGCAGAAAGGAATGCTGGTACCCGGCAGCTCTCTGAGGAATGTTCCCTT
GGCTTTGACTATTCTGCTGGGAACAAGGAAGGAAACACATATATAAAATGAATTTATAATGTCTCTGGCT
TGTAATGGCAGAATGATAAGAAAAGTTGGCTGTTTAATATAAACTGTCAGTTGCATATTCCAGGCCTCCT
CTCTTTGAGGTTCCTCCCACATCCACACGCCTGGCTACTGTTTAGTGCGGAGTACAAAGTGGCCGTTTAT
TATTATTGACTGGTGAGGCCTGTGCTCCAAAATTCATTCTGTCAACAGAATGTAAGCAAAGTTGGCATTT
TAAAGCAGGGCTCTTTCAGTTTCTGGGTTTTCTCAGGATTGCTATGCAACAGGATCAGTGCTGTAGTGCC
CGGTTCAAGCTGAAAATGTTACACAGGAAGACATACCATGTAAAGGTCAGATTCTTCTACTATAATAATT
TTCTTGATCTGTGTGTATACAAGTGAAGTTGAATGCATAACCTCTTATCATAACTCTTACCAAGGTCCTA
TGTACTTTCCACCTGTCAAGCCTAAAAATGTGTATTAAATGGGAAATCAAAACTAATAAATGTATGATGC
TGTACTATATGTATGATGCTATAATACCAAGGTGAACTTAATTTGTGTTGTCAAGAAGATTTTCTCTCCC
ATGACAGACTCCCAGGAATGTGCTGGTGCTGTGGGCCAAGTGCAATCTTGTTTATTAGTCTCTCCACGCT
TTTATGGTCAGAGTTAACTCTACAGATTACTACGTAAATAGAAAATATGACTTGATCCATATAGTAATGA
AATTATTGGCACTGGGGTACACTTTATCATAGAATTTTATTGCCTATCACTTCCATAAAATAATACATTT
TGTCCATAGACTAGAAGATATAACTTGTGAACTTTATAAAGTTATAAATACATTACTTTCCAACTCATAA
TGGCAAGGAATAAATCTATTACAACTAATAAGATGCCCATTTTAAATCTACATAATAACAGGAGAAGGCA
ATACGCCAAGAAAAGGGATTTGAGATGTATCTTCTTGTTAGTTTAGCCTGATTGAAATGTCTTTTGAACT
AATAATTATTTATATTTTGCAATTCTCCAAATTCACATTCATCGCTTGTTTCTTTTGTTTGGTAATTCTG
CACATATTCTTCTTCCTGCTGTCCTGTAG

[0265] Homo sapiens dystrophin (DMD), intron 55 target sequence 1 (nucleotide positions 1716938-1716987 of NCBI Reference Sequence: NG_012232.1)

(SEQ ID NO: 2158)
GTAAGTCAGGCATTTCCGCTTTAGCACTCTTGTGGATCCAATTGAACAAT

[0266] Homo sapiens dystrophin (DMD), intron 55 target sequence 2 (nucleotide positions 1716950-1717012 of NCBI Reference Sequence: NG_012232.1)

(SEQ ID NO: 2159)
TTTCCGCTTTAGCACTCTTGTGGATCCAATTGAACAATTCTCAGCATTTG
TACTTGTAACTGA

[0267] Homo sapiens dystrophin (DMD), intron 55 target sequence 3 (nucleotide positions 1717003-1717050 of NCBI Reference Sequence: NG_012232.1)

(SEQ ID NO: 2160)
TTGTAACTGACAAGCCAGGGACAAAACAAAATAGTTGCTTTTATACAG

[0268] Homo sapiens dystrophin (DMD), intron 55 target sequence 4 (nucleotide positions 1837063-1837116 of NCBI Reference Sequence: NG_012232.1)

(SEQ ID NO: 2161)
TTATTTATATTTTGCAATTCTCCAAATTCACATTCATCGCTTGTTTCTTT
TGTT

[0269] Homo sapiens dystrophin (DMD), intron 55 target sequence 5 (nucleotide positions 1837104-1837153 of NCBI Reference Sequence: NG_012232.1)

(SEQ ID NO: 2162)
TGTTTCTTTTGTTTGGTAATTCTGCACATATTCTTCTTCCTGCTGTCCTG

[0270] Homo sapiens dystrophin (DMD), intron 55 target sequence 6 (nucleotide positions 1836907-1837156 of NCBI Reference Sequence: NG_012232.1)

(SEQ ID NO: 2163)
CCAACTCATAATGGCAAGGAATAAATCTATTACAACTAATAAGATGCCCA
TTTTAAATCTACATAATAACAGGAGAAGGCAATACGCCAAGAAAAGGGAT
TTGAGATGTATCTTCTTGTTAGTTTAGCCTGATTGAAATGTCTTTTGAAC
TAATAATTATTTATATTTTGCAATTCTCCAAATTCACATTCATCGCTTGT
TTCTTTTGTTTGGTAATTCTGCACATATTCTTCTTCCTGCTGTCCTGTAG

[0271] Homo sapiens dystrophin (DMD) intron 55/exon 56 junction (nucleotide positions 1837127-1837186 of NCBI Reference Sequence: NG_012232.1)

(SEQ ID NO: 2164)
GCACATATTCTTCTTCCTGCTGTCCTGTAGGACCTCCAAGGTGAAATTGA
AGCTCACACA

[0272] Homo sapiens dystrophin (DMD), transcript variant Dp427m, exon 56 (nucleotide positions 8462-8634 of NCBI Reference Sequence: NM_004006.2; nucleotide positions 1837157-1837329 of NCBI Reference Sequence: NG_012232.1)

(SEQ ID NO: 2165)
GACCTCCAAGGTGAAATTGAAGCTCACACAGATGTTTATCACAACCTGGA
TGAAAACAGCCAAAAAATCCTGAGATCCCTGGAAGGTTCCGATGATGCAG
TCCTGTTACAAAGACGTTTGGATAACATGAACTTCAAGTGGAGTGAACTT
CGGAAAAAGTCTCTCAACATTAG

[0273] Homo sapiens dystrophin (DMD), exon 56 target sequence 1 (nucleotide positions 1837157-1837281 of NCBI Reference Sequence: NG_012232.1)

(SEQ ID NO: 2166)
GACCTCCAAGGTGAAATTGAAGCTCACACAGATGTTTATCACAACCTGGA
TGAAAACAGCCAAAAAATCCTGAGATCCCTGGAAGGTTCCGATGATGCAG
TCCTGTTACAAAGACGTTTGGATAA

[0274] Homo sapiens dystrophin (DMD), exon 56 target sequence 2 (nucleotide positions 1837157-1837201 of NCBI Reference Sequence: NG_012232.1)

(SEQ ID NO: 2167)
GACCTCCAAGGTGAAATTGAAGCTCACACAGATGTTTATCACAAC

[0275] Homo sapiens dystrophin (DMD), exon 56 target sequence 3 (nucleotide positions 1837181-1837237 of NCBI Reference Sequence: NG_012232.1)

(SEQ ID NO: 2168)
CACACAGATGTTTATCACAACCTGGATGAAAACAGCCAAAAAATCCTGAG
ATCCCTG

[0276] Homo sapiens dystrophin (DMD), exon 56 target sequence 4 (nucleotide positions 1837225-1837281 of NCBI Reference Sequence: NG_012232.1)

(SEQ ID NO: 2169)
CCTGAGATCCCTGGAAGGTTCCGATGATGCAGTCCTGTTACAAAGACGTT
TGGATAA

[0277] In some embodiments, an oligonucleotide useful for targeting DMD (e.g., for exon skipping) targets a splicing feature in a DMD sequence (e.g., a DMD pre-mRNA). In some embodiments, a splicing feature in a DMD sequence is an exonic splicing enhancer (ESE), a branch point, a splice donor site, or a splice acceptor site in a DMD sequence. In some embodiments, an ESE is in exon 55 of a DMD sequence (e.g., a DMD pre-mRNA). In some embodiments, a branch point is in intron 54 or intron 55 of a DMD sequence (e.g., a DMD pre-mRNA). In some embodiments, a splice donor site is across the junction of exon 54 and intron 54, in intron 54, across the junction of exon 55 and intron 55, or in intron 55 of a DMD sequence (e.g., a DMD pre-mRNA). In some embodiments, a splice acceptor site is in intron 54, across the junction of intron 54 and exon 55, in intron 55, or across the junction of intron 55 and exon 56 of a DMD sequence (e.g., a DMD pre-mRNA). In some embodiments, the oligonucleotide useful for targeting DMD promotes skipping of exon 55, such as by targeting a splicing feature (e.g., an ESE, a branch point, a splice donor site, or a splice acceptor site) in a DMD sequence (e.g., a DMD pre-mRNA). Examples of ESEs, branch points, splice donor sites, and splice acceptor sites are provided in Table 9.

[0278] In some embodiments, an oligonucleotide useful for targeting DMD (e.g., for exon skipping) targets an exonic splicing enhancer (ESE) in a DMD sequence. In some embodiments, an oligonucleotide useful for targeting DMD (e.g., for exon skipping) targets an ESE in DMD exon 55 (e.g., an ESE listed in Table 9).

[0279] In some embodiments, an oligonucleotide useful for targeting DMD (e.g., for exon skipping, such as for skipping exon 55) comprises a region of complementarity to a target sequence comprising one or more full or partial ESEs of a DMD transcript (e.g., one or more full or partial ESEs listed in Table 9). In some embodiments, the oligonucleotide comprises a region of complementarity to a target sequence comprising one or more full or partial ESEs of DMD exon 55. In some embodiments, the oligonucleotide comprises a region of complementarity to a target sequence comprising one or more full or partial ESEs as set forth in any one of SEQ ID NOs: 2020-2027, 2031-2061, and 2064-2080. In some embodiments, the oligonucleotide comprises a region of complementarity to a target sequence comprising at least 4 (e.g., 4, 5, 6, 7, or 8) consecutive nucleotides of an ESE as set forth in any one of SEQ ID NOs: 2020-2027, 2031-2061, and 2064-2080. In some embodiments, the oligonucleotide comprises at least 4 (e.g., 4, 5, 6, 7, or 8) consecutive nucleotides of an ESE antisense sequence as set forth in any one of SEQ ID NOs: 2081-2088, 2092-2122, and 2125-2141.

[0280] In some embodiments, the oligonucleotide comprises a region of complementarity to a target sequence comprising at least 6 (e.g., 6, 7, 8, 9, 10, 11, 12, 13, 14, 15, 16, 17, 18, 19, 20, or more) nucleotides of one or more ESEs (e.g., 2, 3, 4, or more adjacent ESEs) of DMD exon 55. In some embodiments, the oligonucleotide comprises a region of complementarity to a target sequence comprising at least 6 (e.g., 6, 7, 8, 9, 10, 11, 12, 13, 14, 15, 16, 17, 18, 19, 20, or more) nucleotides of one or more ESEs (e.g., 2, 3, 4, or more adjacent ESEs) as set forth in any one of SEQ ID NOs: 2020-2027, 2031-2061, and 2064-2080. In some embodiments, the oligonucleotide comprises at least 6 (e.g., 6, 7, 8, 9, 10, 11, 12, 13, 14, 15, 16, 17, 18, 19, 20, or more) nucleotides of one or more ESE antisense sequences (e.g., antisense sequences of 2, 3, 4, or more adjacent ESEs) as set forth in any one of SEQ ID NOs: 2081-2088, 2092-2122, and 2125-2141.

[0281] In some embodiments, an oligonucleotide useful for targeting DMD (e.g., for exon skipping, such as for skipping exon 55) is 18-35 nucleotides in length, and comprises a region of complementarity to a target sequence comprising at least 4 (e.g., 4, 5, 6, 7, or 8) consecutive nucleotides of an ESE as set forth in any one of SEQ ID NOs: 2020-2027, 2031-2061, and 2064-2080. In some embodiments, an oligonucleotide useful for targeting DMD (e.g., for exon skipping, such as for skipping exon 55) is 20-30 (e.g., 20, 25, 30) nucleotides in length, and comprises a region of complementarity to a target sequence comprising at least 4 (e.g., 4, 5, 6, 7, or 8) consecutive nucleotides of an ESE as set forth in any one of SEQ ID NOs: 2020-2027, 2031-2061, and 2064-2080. In some embodiments, an oligonucleotide useful for targeting DMD (e.g., for exon skipping, such as for skipping exon 55) is 20-25 (i.e., 20, 21, 22, 23, 24, or 25) nucleotides in length, and comprises a region of complementarity to a target sequence comprising at least 4 (e.g., 4, 5, 6, 7, or 8) consecutive nucleotides of an ESE as set forth in any one of SEQ ID NOs: 2020-2027, 2031-2061, and 2064-2080. In some embodiments, an oligonucleotide useful for targeting DMD (e.g., for exon skipping) is 30 nucleotides in length, and comprises a region of complementarity to a target sequence comprising at least 4 (e.g., 4, 5, 6, 7, or 8) consecutive nucleotides of an ESE as set forth in any one of SEQ ID NOs: 2020-2027, 2031-2061, and 2064-2080.

[0282] In some embodiments, an oligonucleotide useful for targeting DMD (e.g., for exon skipping) targets a branch point in a DMD sequence. In some embodiments, an oligonucleotide useful for targeting DMD (e.g., for exon skipping) targets a branch point in DMD intron 54 or intron 55 (e.g., a branch point listed in Table 9).

[0283] In some embodiments, an oligonucleotide useful for targeting DMD (e.g., for exon skipping, such as for skipping exon 55) comprises a region of complementarity to a target sequence comprising a full or partial branch point of a DMD transcript (e.g., a full or partial branch point listed in Table 9). In some embodiments, the oligonucleotide comprises a region of complementarity to a target sequence comprising a full or partial branch point of DMD intron 54 or intron 55. In some embodiments, the oligonucleotide comprises a region of complementarity to a target sequence comprising a full or partial branch point as set forth in SEQ ID NO: 2029. In some embodiments, the oligonucleotide comprises a region of complementarity to a target sequence comprising at least 4 (e.g., 4, 5, 6, or 7) consecutive nucleotides of a branch point as set forth in SEQ ID NO: 2029. In some embodiments, the oligonucleotide comprises at least 4 (e.g., 4, 5, 6, or 7) consecutive nucleotides of a branch point antisense sequence as set forth in SEQ ID NO: 2090.

[0284] In some embodiments, an oligonucleotide useful for targeting DMD (e.g., for exon skipping, such as for skipping exon 55) is 18-35 nucleotides in length, and comprises a region of complementarity to a target sequence comprising at least 4 (e.g., 4, 5, 6, or 7) consecutive nucleotides of a branch point as set forth in SEQ ID NO: 2029. In some embodiments, an oligonucleotide useful for targeting DMD (e.g., for exon skipping, such as for skipping exon 55) is 20-30 (e.g., 20, 25, 30) nucleotides in length, and comprises a region of complementarity to a target sequence comprising at least 4 (e.g., 4, 5, 6, or 7) consecutive nucleotides of a branch point as set forth in SEQ ID NO: 2029. In some embodiments, an oligonucleotide useful for targeting DMD (e.g., for exon skipping, such as for skipping exon 55) is 20-25 (i.e., 20, 21, 22, 23, 24, or 25) nucleotides in length, and comprises a region of complementarity to a target sequence comprising at least 4 (e.g., 4, 5, 6, or 7) consecutive nucleotides of a branch point as set forth in SEQ ID NO: 2029. In some embodiments, an oligonucleotide useful for targeting DMD (e.g., for exon skipping) is 30 nucleotides in length, and comprises a region of complementarity to a target sequence comprising at least 4 (e.g., 4, 5, 6, or 7) consecutive nucleotides of a branch point as set forth in SEQ ID NO: 2029.

[0285] In some embodiments, an oligonucleotide useful for targeting DMD (e.g., for exon skipping) targets a splice donor site in a DMD sequence. In some embodiments, an oligonucleotide useful for targeting DMD (e.g., for exon skipping) targets a splice donor site across the junction of exon 54 and intron 54, in intron 54, across the junction of exon 55 and intron 55, or in intron 55 (e.g., a splice donor site listed in Table 9).

[0286] In some embodiments, an oligonucleotide useful for targeting DMD (e.g., for exon skipping, such as for skipping exon 55) comprises a region of complementarity to a target sequence comprising a full or partial splice donor site of a DMD transcript (e.g., a full or partial splice donor site listed in Table 9). In some embodiments, the oligonucleotide comprises a region of complementarity to a target sequence comprising a full or partial splice donor site across the junction of exon 54 and intron 54, in intron 54, across the junction of exon 55 and intron 55, or in intron 55 of DMD. In some embodiments, the oligonucleotide comprises a region of complementarity to a target sequence comprising a full or partial splice donor site as set forth in SEQ ID NO: 2028 or 2062. In some embodiments, the oligonucleotide comprises a region of complementarity to a target sequence comprising at least 4 (e.g., 4, 5, 6, 7, or 8) consecutive nucleotides of a splice donor site as set forth in SEQ ID NO: 2028 or 2062. In some embodiments, the oligonucleotide comprises at least 4 (e.g., 4, 5, 6, 7, or 8) consecutive nucleotides of a splice donor site antisense sequence as set forth in SEQ ID NO: 2089 or 2123.

[0287] In some embodiments, an oligonucleotide useful for targeting DMD (e.g., for exon skipping, such as for skipping exon 55) is 18-35 nucleotides in length, and comprises a region of complementarity to a target sequence comprising at least 4 (e.g., 4, 5, 6, 7, or 8) consecutive nucleotides of a splice donor site as set forth in SEQ ID NO: 2028 or 2062. In some embodiments, an oligonucleotide useful for targeting DMD (e.g., for exon skipping, such as for skipping exon 55) is 20-30 (e.g., 20, 25, 30) nucleotides in length, and comprises a region of complementarity to a target sequence comprising at least 4 (e.g., 4, 5, 6, 7, or 8) consecutive nucleotides of a splice donor site as set forth in SEQ ID NO: 2028 or 2062. In some embodiments, an oligonucleotide useful for targeting DMD (e.g., for exon skipping, such as for skipping exon 55) is 20-25 (i.e., 20, 21, 22, 23, 24, or 25) nucleotides in length, and comprises a region of complementarity to a target sequence comprising at least 4 (e.g., 4, 5, 6, 7, or 8) consecutive nucleotides of a splice donor site as set forth in SEQ ID NO: 2028 or 2062. In some embodiments, an oligonucleotide useful for targeting DMD (e.g., for exon skipping) is 30 nucleotides in length, and comprises a region of complementarity to a target sequence comprising at least 4 (e.g., 4, 5, 6, 7, or 8) consecutive nucleotides of a splice donor site as set forth in SEQ ID NO: 2028 or 2062.

[0288] In some embodiments, an oligonucleotide useful for targeting DMD (e.g., for exon skipping) targets a splice acceptor site in a DMD sequence. In some embodiments, an oligonucleotide useful for targeting DMD (e.g., for exon skipping) targets a splice acceptor site in intron 54, across the junction of intron 54 and exon 55, in intron 55, or across the junction of intron 55 and exon 56 (e.g., a splice acceptor site listed in Table 9).

[0289] In some embodiments, an oligonucleotide useful for targeting DMD (e.g., for exon skipping, such as for skipping exon 55) comprises a region of complementarity to a target sequence comprising a full or partial splice acceptor site of a DMD transcript (e.g., a full or partial splice acceptor site listed in Table 9). In some embodiments, the oligonucleotide comprises a region of complementarity to a target sequence comprising a full or partial splice acceptor site in intron 54, across the junction of intron 54 and exon 55, in intron 55, or across the junction of intron 55 and exon 56 of DMD. In some embodiments, the oligonucleotide comprises a region of complementarity to a target sequence comprising a full or partial splice acceptor site as set forth in SEQ ID NO: 2030 or 2063. In some embodiments, the oligonucleotide comprises a region of complementarity to a target sequence comprising at least 4 (e.g., 4, 5, 6, 7, 8, 9, 10, or 11) consecutive nucleotides of a splice acceptor site as set forth in SEQ ID NO: 2030 or 2063. In some embodiments, the oligonucleotide comprises at least 4 (e.g., 4, 5, 6, 7, 8, 9, 10, or 11) consecutive nucleotides of a splice acceptor site antisense sequence as set forth in SEQ ID NO: 2091 or 2124.

[0290] In some embodiments, an oligonucleotide useful for targeting DMD (e.g., for exon skipping, such as for skipping exon 55) is 18-35 nucleotides in length, and comprises a region of complementarity to a target sequence comprising at least 4 (e.g., 4, 5, 6, 7, 8, 9, 10, or 11) consecutive nucleotides of a splice acceptor site as set forth in SEQ ID NO: 2030 or 2063. In some embodiments, an oligonucleotide useful for targeting DMD (e.g., for exon skipping, such as for skipping exon 55) is 20-30 (e.g., 20, 25, 30) nucleotides in length, and comprises a region of complementarity to a target sequence comprising at least 4 (e.g., 4, 5, 6, 7, 8, 9, 10, or 11) consecutive nucleotides of a splice acceptor site as set forth in SEQ ID NO: 2030 or 2063. In some embodiments, an oligonucleotide useful for targeting DMD (e.g., for exon skipping, such as for skipping exon 55) is 20-25 (i.e., 20, 21, 22, 23, 24, or 25) nucleotides in length, and comprises a region of complementarity to a target sequence comprising at least 4 (e.g., 4, 5, 6, 7, 8, 9, 10, or 11) consecutive nucleotides of a splice acceptor site as set forth in SEQ ID NO: 2030 or 2063. In some embodiments, an oligonucleotide useful for targeting DMD (e.g., for exon skipping) is 30 nucleotides in length, and comprises a region of complementarity to a target sequence comprising at least 4 (e.g., 4, 5, 6, 7, 8, 9, 10, or 11) consecutive nucleotides of a splice acceptor site as set forth in SEQ ID NO: 2030 or 2063.

[0291] In some embodiments, an oligonucleotide useful for targeting DMD (e.g., for exon skipping) comprises a region of complementarity to a junction of an exon and an intron of a DMD RNA (e.g., any one of the exon/intron junctions provided by SEQ ID NOs: 2144, 2151, 2156, and 2164). In some embodiments, an oligonucleotide useful for targeting DMD (e.g., for exon skipping) comprises a region of complementarity to at least 10 (e.g., 10, 11, 12, 13, 14, 15, 16, 17, 18, 19, 20, 21, 22, 23, 24, 25, or more) consecutive nucleosides of ajunction of an exon and an intron of a DMD RNA (e.g., any one of the exon/intronjunctions provided by SEQ ID NOs: 2144, 2151, 2156, and 2164). In some embodiments, an oligonucleotide useful for targeting DMD (e.g., for exon skipping) is complementary to any one of SEQ ID NOs: 2144, 2151, 2156, and 2164.

[0292] In some embodiments, an oligonucleotide useful for targeting DMD (e.g., for exon skipping) comprises a region of complementarity to a target sequence of a DMD RNA (e.g., a target sequence provided by any one of SEQ ID NOs: 2143, 2146-2150, 2153-2155, 2158-2163, and 2166-2169). In some embodiments, an oligonucleotide useful for targeting DMD (e.g., for exon skipping) comprises a region of complementarity to at least 10 (e.g., 10, 11, 12, 13, 14, 15, 16, 17, 18, 19, 20, 21, 22, 23, 24, 25, or more) consecutive nucleosides of a target sequence of a DMD RNA (e.g., a target sequence provided by any one of SEQ ID NOs: 2143, 2146-2150, 2153-2155, 2158-2163, and 2166-2169). In some embodiments, an oligonucleotide useful for targeting DMD (e.g., for exon skipping) is complementary to any one of SEQ ID NOs: 2143, 2146-2150, 2153-2155, 2158-2163, and 2166-2169.

TABLE 9
Example target sequence motifs

| | | SEQ | | SEQ | Motif |
|---|---|---|---|---|---|
| Location in | | ID | Motif | ID | Antisense |
| DMD | Type | NO: | Sequence† | NO: | Sequence† |
| Exon 54 | ESE | 2020 | ATTCTGC | 2081 | GCAGAAT |
| Exon 54 | ESE | 2021 | CTGCAGA | 2082 | TCTGCAG |
| Exon 54 | ESE | 2022 | TGCAGA | 2083 | TCTGCA |
| Exon 54 | ESE | 2023 | CAGATGA | 2084 | TCATCTG |
| Exon 54 | ESE | 2024 | CCACATG | 2085 | CATGTGG |
| Exon 54 | ESE | 2025 | CACATGA | 2086 | TCATGTG |
| Exon 54 | ESE | 2026 | CAGAGAA | 2087 | TTCTCTG |
| Exon 54 | ESE | 2027 | TCAATGC | 2088 | GCATTGA |
| Across exon | Splice | 2028 | AGGTATG | 2089 | CATACCT |
| 54/intron 54 | Donor | | | | |
| junction | | | | | |
| Intron 54 | Branch | 2029 | TTCTGAT | 2090 | ATCAGAA |
| | Point | | | | |
| Across | Splice | 2030 | TCCTTTGC | 2091 | CCTGCAAA |
| intron | Acceptor | | AGG | | GGA |
| 54/exon 55 | | | | | |
| junction | | | | | |
| Exon 55 | ESE | 2031 | CGAGAGG | 2092 | CCTCTCG |
| Exon 55 | ESE | 2032 | GGCTGCTT | 2093 | AAGCAGCC |
| Exon 55 | ESE | 2033 | GATTACTG | 2094 | CAGTAATC |
| Exon 55 | ESE | 2034 | TTACTGC | 2095 | GCAGTAA |
| Exon 55 | ESE | 2035 | TGCAAC | 2096 | GTTGCA |
| Exon 55 | ESE | 2036 | CCCCCTG | 2097 | CAGGGGG |
| Exon 55 | ESE | 2037 | CCCCTGG | 2098 | CCAGGGG |
| Exon 55 | ESE | 2038 | CCCTGGA | 2099 | TCCAGGG |
| Exon 55 | ESE | 2039 | GTTTCTTG | 2100 | CAAGAAAC |
| Exon 55 | ESE | 2040 | TTTCTTG | 2101 | CAAGAAA |
| Exon 55 | ESE | 2041 | TGCCTGG | 2102 | CCAGGCA |
| Exon 55 | ESE | 2042 | GGCTTACA | 2103 | TGTAAGCC |
| Exon 55 | ESE | 2043 | TTACAGA | 2104 | TCTGTAA |
| Exon 55 | ESE | 2044 | TACAGA | 2105 | TCTGTA |
| Exon 55 | ESE | 2045 | ACAGAAG | 2106 | CTTCTGT |
| Exon 55 | ESE | 2046 | CTGCCAA | 2107 | TTGGCAG |
| Exon 55 | ESE | 2047 | TGCCAATG | 2108 | CATTGGCA |
| Exon 55 | ESE | 2048 | GTCCTACA | 2109 | TGTAGGAC |
| Exon 55 | ESE | 2049 | CTACAGG | 2110 | CCTGTAG |
| Exon 55 | ESE | 2050 | TACAGGA | 2111 | TCCTGTA |
| Exon 55 | ESE | 2051 | GGATGCTA | 2112 | TAGCATCC |
| Exon 55 | ESE | 2052 | CTACCCG | 2113 | CGGGTAG |
| Exon 55 | ESE | 2053 | TACCCGTA | 2114 | TACGGGTA |
| Exon 55 | ESE | 2054 | GGCTCCTA | 2115 | TAGGAGCC |
| Exon 55 | ESE | 2055 | CTAGAAG | 2116 | CTTCTAG |
| Exon 55 | ESE | 2056 | AGACTCC | 2117 | GGAGTCT |
| Exon 55 | ESE | 2057 | GACTCCAA | 2118 | TTGGAGTC |
| Exon 55 | ESE | 2058 | CTCCAAG | 2119 | CTTGGAG |
| Exon 55 | ESE | 2059 | CCAAGGG | 2120 | CCCTTGG |
| Exon 55 | ESE | 2060 | CTGATGA | 2121 | TCATCAG |
| Exon 55 | ESE | 2061 | ACAATGG | 2122 | CCATTGT |
| Across exon | Splice | 2062 | AAGTAAG | 2123 | CTTACTT |
| 55/intron 55 | Donor | | | | |
| junction | | | | | |
| Across | Splice | 2063 | TCCTGTAGG | 2124 | CCTACAGGA |
| intron | Acceptor | | | | |
| 55/exon 56 | | | | | |
| junction | | | | | |
| Exon 56 | ESE | 2064 | GACCTCCA | 2125 | TGGAGGTC |
| Exon 56 | ESE | 2058 | CTCCAAG | 2119 | CTTGGAG |
| Exon 56 | ESE | 2065 | CCAAGGT | 2126 | ACCTTGG |
| Exon 56 | ESE | 2066 | TCACACA | 2127 | TGTGTGA |
| Exon 56 | ESE | 2067 | CACACAG | 2128 | CTGTGTG |
| Exon 56 | ESE | 2068 | ACACAGA | 2129 | TCTGTGT |
| Exon 56 | ESE | 2069 | CACAGA | 2130 | TCTGTG |
| Exon 56 | ESE | 2070 | CAGATGT | 2131 | ACATCTG |
| Exon 56 | ESE | 2071 | TCACAAC | 2132 | GTTGTGA |
| Exon 56 | ESE | 2072 | CAGCCAA | 2133 | TTGGCTG |
| Exon 56 | ESE | 2073 | AAATCCTG | 2134 | CAGGATTT |
| Exon 56 | ESE | 2074 | CTGAGAT | 2135 | ATCTCAG |
| Exon 56 | ESE | 2075 | GATCCCTG | 2136 | CAGGGATC |
| Exon 56 | ESE | 2076 | TCCCTGG | 2137 | CCAGGGA |
| Exon 56 | ESE | 2038 | CCCTGGA | 2099 | TCCAGGG |
| Exon 56 | ESE | 2077 | GGTTCCGA | 2138 | TCGGAACC |
| Exon 56 | ESE | 2078 | CCGATGA | 2139 | TCATCGG |
| Exon 56 | ESE | 2079 | TTACAAA | 2140 | TTTGTAA |
| Exon 56 | ESE | 2080 | AAGACGT | 2141 | ACGTCTT |

†Each thymine base (T) in any one of the sequences provided in Table 9 may independently and optionally be replaced with a uracil base (U). Motif sequences and antisense sequences listed in Table 9 contain T's, but binding of a motif sequence in RNA and/or DNA is contemplated.

[0293] In some embodiments, any one of the oligonucleotides useful for targeting DMD (e.g., for exon skipping) is a phosphorodiamidate morpholino oligomer (PMO).

[0294] In some embodiments, the oligonucleotide may have region of complementarity to a mutant DMD allele, for example, a DMD allele with at least one mutation in any of exons 1-79 of DMD in humans that leads to a frameshift and improper RNA splicing/processing.

[0295] In some embodiments, any one of the oligonucleotides can be in salt form, e.g., as sodium, potassium, or magnesium salts.

[0296] In some embodiments, the 5′ or 3′ nucleoside (e.g., terminal nucleoside) of any one of the oligonucleotides described herein is conjugated to an amine group, optionally via a spacer. In some embodiments, the spacer comprises an aliphatic moiety. In some embodiments, the spacer comprises a polyethylene glycol moiety. In some embodiments, a phosphodiester linkage is present between the spacer and the 5′ or 3′ nucleoside of the oligonucleotide. In some embodiments, the 5′ or 3′ nucleoside (e.g., terminal nucleoside) of any of the oligonucleotides described herein is conjugated to a spacer that is a substituted or unsubstituted aliphatic, substituted or unsubstituted heteroaliphatic, substituted or unsubstituted carbocyclylene, substituted or unsubstituted heterocyclylene, substituted or unsubstituted arylene, substituted or unsubstituted heteroarylene, —O—, —N(R^{A})—, —S—, —C(═O)—, —C(═O)O—, —C(═O)NR^{A}—, —NR^{A}C(═O)—, —NR^{A}C(═O)R^{A}—, —C(═O)R^{A}—, —NR^{A}C(═O)O—, —NR^{A}C(═O)N(R^{A})—, —OC(═O)—, —OC(═O)O—, —OC(═O)N(R^{A})—, —S(O)₂NR^{A}—, —NR^{A}S(O)₂—, or a combination thereof; each R^{A} is independently hydrogen or substituted or unsubstituted alkyl. In certain embodiments, the spacer is a substituted or unsubstituted alkylene, substituted or unsubstituted heterocyclylene, substituted or unsubstituted heteroarylene, —O—, —N(R^{A})—, or —C(═O)N(R^{A})₂, or a combination thereof.

[0297] In some embodiments, the 5′ or 3′ nucleoside of any one of the oligonucleotides described herein is conjugated to a compound of the formula —NH₂—(CH₂)ₙ—, wherein n is an integer from 1 to 12. In some embodiments, n is 6, 7, 8, 9, 10, 11, or 12. In some embodiments, a phosphodiester linkage is present between the compound of the formula NH₂—(CH₂)n- and the 5′ or 3′ nucleoside of the oligonucleotide. In some embodiments, a compound of the formula NH₂—(CH₂)₆— is conjugated to the oligonucleotide via a reaction between 6-amino-1-hexanol (NH₂—(CH₂)₆—OH) and the 5′ phosphate of the oligonucleotide.

[0298] In some embodiments, the oligonucleotide is conjugated to a targeting agent, e.g., a muscle targeting agent such as an anti-TfR1 antibody, e.g., via the amine group.

a. Oligonucleotide Size/Sequence

[0299] Oligonucleotides may be of a variety of different lengths, e.g., depending on the format. In some embodiments, an oligonucleotide is 7, 8, 9, 10, 11, 12, 13, 14, 15, 16, 17, 18, 19, 20, 21, 22, 23, 24, 25, 26, 27, 28, 29, 30, 35, 40, 45, 50, 75, or more nucleotides in length. In some embodiments, the oligonucleotide is 8 to 50 nucleotides in length, 8 to 40 nucleotides in length, 8 to 30 nucleotides in length, 10 to 15 nucleotides in length, 10 to 20 nucleotides in length, 15 to 25 nucleotides in length, 21 to 23 nucleotides in lengths, 20 to 25 nucleotides in length, etc.

[0300] In some embodiments, a nucleic acid sequence of an oligonucleotide for purposes of the present disclosure is “complementary” to a target nucleic acid when it is specifically hybridizable to the target nucleic acid. In some embodiments, an oligonucleotide hybridizing to a target nucleic acid (e.g., an mRNA or pre-mRNA molecule) results in modulation of activity or expression of the target (e.g., decreased mRNA translation, altered pre-mRNA splicing, exon skipping, target mRNA degradation, etc.). In some embodiments, a nucleic acid sequence of an oligonucleotide has a sufficient degree of complementarity to its target nucleic acid such that it does not hybridize non-target sequences under conditions in which avoidance of non-specific binding is desired, e.g., under physiological conditions. Thus, in some embodiments, an oligonucleotide may be at least 80%, at least 85%, at least 90%, at least 91%, at least 92%, at least 93%, at least 94%, at least 95%, at least 96%, at least 97%, at least 98%, at least 99% or 100% complementary to the consecutive nucleotides of a target nucleic acid. In some embodiments a complementary nucleotide sequence need not be 100% complementary to that of its target to be specifically hybridizable or specific for a target nucleic acid. In certain embodiments, oligonucleotides comprise one or more mismatched nucleobases relative to the target nucleic acid. In certain embodiments, activity relating to the target is reduced by such mismatch, but activity relating to a non-target is reduced by a greater amount (i.e., selectivity for the target nucleic acid is increased and off-target effects are decreased).

[0301] In some embodiments, an oligonucleotide comprises region of complementarity to a target nucleic acid that is in the range of 8 to 15, 8 to 30, 8 to 40, or 10 to 50, or 5 to 50, 15 to 20, 20 to 25, or 5 to 40 nucleotides in length. In some embodiments, a region of complementarity of an oligonucleotide to a target nucleic acid is 5, 6, 7, 8, 9, 10, 11, 12, 13, 14, 15, 16, 17, 18, 19, 20, 21, 22, 23, 24, 25, 26, 27, 28, 29, 30, 31, 32, 33, 34, 35, 36, 37, 38, 39, 40, 41, 42, 43, 44, 45, 46, 47, 48, 49, or 50 nucleotides in length. In some embodiments, the region of complementarity is complementary with at least 8 consecutive nucleotides of a target nucleic acid. In some embodiments, an oligonucleotide may contain 1, 2 or 3 base mismatches compared to the portion of the consecutive nucleotides of target nucleic acid. In some embodiments the oligonucleotide may have up to 3 mismatches over 15 bases, or up to 2 mismatches over 10 bases.

[0302] In some embodiments, the oligonucleotide is complementary (e.g., at least 85% at least 90%, at least 95%, or 100%) to a target sequence of the any one of the oligonucleotides described herein (e.g., the oligonucleotides listed in Table 8). In some embodiments, the oligonucleotide is complementary (e.g., at least 85% at least 90%, at least 95%, or 100%) to a target sequence of the any one of the oligonucleotides provided by SEQ ID NO: 780-2019. In some embodiments, such target sequence is 100% complementary to an oligonucleotide listed in Table 8. In some embodiments, such target sequence is 100% complementary to an oligonucleotide provided by SEQ ID NO: 780-2019. In some embodiments, the oligonucleotide is complementary (e.g., at least 85% at least 90%, at least 95%, or 100%) to a target sequence provided herein (e.g., a target sequence listed in Table 8). In some embodiments, the oligonucleotide is complementary (e.g., at least 85% at least 90%, at least 95%, or 100%) to any one of SEQ ID NO: 160-779.

[0303] In some embodiments, an oligonucleotide useful for targeting DMD (e.g., for exon skipping) comprises a region of complementarity to a target sequence of a DMD RNA (e.g., a target sequence provided by any one of SEQ ID NOs: 160-779). In some embodiments, an oligonucleotide useful for targeting DMD (e.g., for exon skipping) comprises a region of complementarity to at least 8 (e.g., 8, 9, 10, 11, 12, 13, 14, 15, 16, 17, 18, 19, 20, 21, 22, 23, 24, 25, or more) consecutive nucleosides of a target sequence of a DMD RNA (e.g., a target sequence provided by any one of SEQ ID NOs: 160-779). In some embodiments, an oligonucleotide useful for targeting DMD (e.g., for exon skipping) is complementary to any one of SEQ ID NOs: 160-779.

[0304] In some embodiments, an oligonucleotide useful for targeting DMD (e.g., for exon skipping) comprises a sequence comprising at least 8 (e.g., 8, 9, 10, 11, 12, 13, 14, 15, 16, 17, 18, 19, 20, 21, 22, 23, 24, 25, or more) consecutive nucleobases of a DMD-targeting sequence provided herein (e.g., an antisense sequence listed in Table 8). In some embodiments, the oligonucleotide comprises a sequence comprising at least 8 (e.g., 8, 9, 10, 11, 12, 13, 14, 15, 16, 17, 18, 19, 20, 21, 22, 23, 24, 25, or more) consecutive nucleobases of any one of SEQ ID NOs: 780-2019. In some embodiments, the oligonucleotide comprises the sequence of any one of SEQ ID NOs: 780-2019.

[0305] In some embodiments, an oligonucleotide useful for targeting DMD (e.g., for exon skipping) comprises a region of complementarity to a target sequence of a DMD RNA (e.g., a target sequence provided by any one of SEQ ID NOs: 160, 162-166, 168, 169, 173, 178-180, 243-251, 253, 255, 256, 262-266, 268, 270-272, 274, 282-284, 289-291, 294, 295, 319, 343, 347, 351, 356-358, 364, 366, 367, 398, 401, 453-455, 462, 463, 526, 573, 748, and 755). In some embodiments, an oligonucleotide useful for targeting DMD (e.g., for exon skipping) comprises a region of complementarity to at least 8 (e.g., 8, 9, 10, 11, 12, 13, 14, 15, 16, 17, 18, 19, 20, 21, 22, 23, 24, 25, or more) consecutive nucleosides of a target sequence of a DMD RNA (e.g., a target sequence provided by any one of SEQ ID NOs: 160, 162-166, 168, 169, 173, 178-180, 243-251, 253, 255, 256, 262-266, 268, 270-272, 274, 282-284, 289-291, 294, 295, 319, 343, 347, 351, 356-358, 364, 366, 367, 398, 401, 453-455, 462, 463, 526, 573, 748, and 755). In some embodiments, an oligonucleotide useful for targeting DMD (e.g., for exon skipping) is complementary to any one of SEQ ID NOs: 160, 162-166, 168, 169, 173, 178-180, 243-251, 253, 255, 256, 262-266, 268, 270-272, 274, 282-284, 289-291, 294, 295, 319, 343, 347, 351, 356-358, 364, 366, 367, 398, 401, 453-455, 462, 463, 526, 573, 748, and 755.

[0306] In some embodiments, an oligonucleotide useful for targeting DMD (e.g., for exon skipping) comprises a sequence comprising at least 8 (e.g., 8, 9, 10, 11, 12, 13, 14, 15, 16, 17, 18, 19, 20, 21, 22, 23, 24, 25, or more) contiguous nucleobases of a DMD-targeting sequence provided herein (e.g., a sequence of any one of SEQ ID NOs: 1400, 1402-1406, 1408, 1409, 1413, 1418-1420, 1483-1491, 1493, 1495, 1496, 1502-1506, 1508, 1510-1512, 1514, 1522-1524, 1529-1531, 1534, 1535, 1559, 1583, 1587, 1591, 1596, 1597, 1598, 1604, 1606, 1607, 1638, 1641, 1693-1695, 1702, 1703, 1766, 1813, 1988, and 1995). In some embodiments, the oligonucleotide comprises at least 8 (e.g., 8, 9, 10, 11, 12, 13, 14, 15, 16, 17, 18, 19, 20, 21, 22, 23, 24, 25, or more) consecutive nucleosides of a DMD-targeting sequence provided herein (e.g., a sequence of any one of SEQ ID NOs: 1400, 1402-1406, 1408, 1409, 1413, 1418-1420, 1483-1491, 1493, 1495, 1496, 1502-1506, 1508, 1510-1512, 1514, 1522-1524, 1529-1531, 1534, 1535, 1559, 1583, 1587, 1591, 1596, 1597, 1598, 1604, 1606, 1607, 1638, 1641, 1693-1695, 1702, 1703, 1766, 1813, 1988, and 1995). In some embodiments, the oligonucleotide comprises the sequence of any one of SEQ ID NOs: 1400, 1402-1406, 1408, 1409, 1413, 1418-1420, 1483-1491, 1493, 1495, 1496, 1502-1506, 1508, 1510-1512, 1514, 1522-1524, 1529-1531, 1534, 1535, 1559, 1583, 1587, 1591, 1596, 1597, 1598, 1604, 1606, 1607, 1638, 1641, 1693-1695, 1702, 1703, 1766, 1813, 1988, and 1995.

[0307] In some embodiments, it should be appreciated that methylation of the nucleobase uracil at the C5 position forms thymine. Thus, in some embodiments, a nucleotide or nucleoside having a C5 methylated uracil (or 5-methyl-uracil) may be equivalently identified as a thymine nucleotide or nucleoside.

[0308] In some embodiments, any one or more of the thymine bases (T's) in any one of the oligonucleotides provided herein (e.g., the oligonucleotides listed in Table 8) may independently and optionally be uracil bases (U's), and/or any one or more of the U's in the oligonucleotides provided herein may independently and optionally be T's. In some embodiments, any one or more of the thymine bases (T's) in any one of the oligonucleotides provided by SEQ ID NOs: 1400-2019 or in an oligonucleotide complementary to any one of SEQ ID NOs: 160-779 may optionally be uracil bases (U's), and/or any one or more of the U's in the oligonucleotides may optionally be T's. In some embodiments, any one or more of the uracil bases (U's) in any one of the oligonucleotides provided by SEQ ID NOs: 780-1399 or in an oligonucleotide complementary to any one of SEQ ID NOs: 160-779 may optionally be thymine bases (T's), and/or any one or more of the T's in the oligonucleotides may optionally be U's.

b. Oligonucleotide Modifications:

[0309] The oligonucleotides described herein may be modified, e.g., comprise a modified sugar moiety, a modified internucleoside linkage, a modified nucleotide or nucleoside and/or (e.g., and) combinations thereof. In addition, in some embodiments, oligonucleotides may exhibit one or more of the following properties: do not mediate alternative splicing; are not immune stimulatory; are nuclease resistant; have improved cell uptake compared to unmodified oligonucleotides; are not toxic to cells or mammals; have improved endosomal exit internally in a cell; minimizes TLR stimulation; or avoid pattern recognition receptors. Any of the modified chemistries or formats of oligonucleotides described herein can be combined with each other. For example, one, two, three, four, five, or more different types of modifications can be included within the same oligonucleotide.

[0310] In some embodiments, certain nucleotide or nucleoside modifications may be used that make an oligonucleotide into which they are incorporated more resistant to nuclease digestion than the native oligodeoxynucleotide or oligoribonucleotide molecules; these modified oligonucleotides survive intact for a longer time than unmodified oligonucleotides. Specific examples of modified oligonucleotides include those comprising modified backbones, for example, modified internucleoside linkages such as phosphorothioates, phosphotriesters, methyl phosphonates, short chain alkyl or cycloalkyl intersugar linkages or short chain heteroatomic or heterocyclic intersugar linkages. Accordingly, oligonucleotides of the disclosure can be stabilized against nucleolytic degradation such as by the incorporation of a modification, e.g., a nucleotide or nucleoside modification.

[0311] In some embodiments, an oligonucleotide may be of up to 50 or up to 100 nucleotides in length in which 2 to 10, 2 to 15, 2 to 16, 2 to 17, 2 to 18, 2 to 19, 2 to 20, 2 to 25, 2 to 30, 2 to 40, 2 to 45, or more nucleotides or nucleosides of the oligonucleotide are modified nucleotides/nucleosides. The oligonucleotide may be of 8 to 30 nucleotides in length in which 2 to 10, 2 to 15, 2 to 16, 2 to 17, 2 to 18, 2 to 19, 2 to 20, 2 to 25, 2 to 30 nucleotides or nucleosides of the oligonucleotide are modified nucleotides/nucleosides. The oligonucleotide may be of 8 to 15 nucleotides in length in which 2 to 4, 2 to 5, 2 to 6, 2 to 7, 2 to 8, 2 to 9, 2 to 10, 2 to 11, 2 to 12, 2 to 13, 2 to 14 nucleotides or nucleosides of the oligonucleotide are modified nucleotides/nucleosides. Optionally, the oligonucleotides may have every nucleotide or nucleoside except 1, 2, 3, 4, 5, 6, 7, 8, 9, or 10 nucleotides/nucleosides modified. Oligonucleotide modifications are described further herein.

c. Modified Nucleosides

[0312] In some embodiments, the oligonucleotide described herein comprises at least one nucleoside modified at the 2′ position of the sugar. In some embodiments, an oligonucleotide comprises at least one 2′-modified nucleoside. In some embodiments, all of the nucleosides in the oligonucleotide are 2′-modified nucleosides.

[0313] In some embodiments, the oligonucleotide described herein comprises one or more non-bicyclic 2′-modified nucleosides, e.g., 2′-deoxy, 2′-fluoro (2′-F), 2′-O-methyl (2′-O-Me), 2′-O-methoxyethyl (2′-MOE), 2′-O-aminopropyl (2′-O-AP), 2′-O-dimethylaminoethyl (2′-O-DMAOE), 2′-O-dimethylaminopropyl (2′-O-DMAP), 2′-O-dimethylaminoethyloxyethyl (2′-O-DMAEOE), or 2′-O—N-methylacetamido (2′-O-NMA) modified nucleoside.

[0314] In some embodiments, the oligonucleotide described herein comprises one or more 2′-4′ bicyclic nucleosides in which the ribose ring comprises a bridge moiety connecting two atoms in the ring, e.g., connecting the 2′-O atom to the 4′-C atom via a methylene (LNA) bridge, an ethylene (ENA) bridge, or a (S)-constrained ethyl (cEt) bridge. Examples of LNAs are described in International Patent Application Publication WO/2008/043753, published on Apr. 17, 2008, and entitled “RNA Antagonist Compounds For The Modulation Of PCSK9”, the contents of which are incorporated herein by reference in its entirety. Examples of ENAs are provided in International Patent Publication No. WO 2005/042777, published on May 12, 2005, and entitled “APP/ENA Antisense”; Morita et al., Nucleic Acid Res., Suppl 1:241-242, 2001; Surono et al., Hum. Gene Ther., 15:749-757, 2004; Koizumi, Curr. Opin. Mol. Ther., 8:144-149, 2006 and Horie et al., Nucleic Acids Symp. Ser (Oxf), 49:171-172, 2005; the disclosures of which are incorporated herein by reference in their entireties. Examples of cEt are provided in U.S. Pat. Nos. 7,101,993; 7,399,845 and 7,569,686, each of which is herein incorporated by reference in its entirety.

[0315] In some embodiments, the oligonucleotide comprises a modified nucleoside disclosed in one of the following United States Patent or Patent Application Publications: U.S. Pat. No. 7,399,845, issued on Jul. 15, 2008, and entitled “6-Modified Bicyclic Nucleic Acid Analogs”; U.S. Pat. No. 7,741,457, issued on Jun. 22, 2010, and entitled “6-Modified Bicyclic Nucleic Acid Analogs”; U.S. Pat. No. 8,022,193, issued on Sep. 20, 2011, and entitled “6-Modified Bicyclic Nucleic Acid Analogs”; U.S. Pat. No. 7,569,686, issued on Aug. 4, 2009, and entitled “Compounds And Methods For Synthesis Of Bicyclic Nucleic Acid Analogs”; U.S. Pat. No. 7,335,765, issued on Feb. 26, 2008, and entitled “Novel Nucleoside And Oligonucleotide Analogues”; U.S. Pat. No. 7,314,923, issued on Jan. 1, 2008, and entitled “Novel Nucleoside And Oligonucleotide Analogues”; U.S. Pat. No. 7,816,333, issued on Oct. 19, 2010, and entitled “Oligonucleotide Analogues And Methods Utilizing The Same” and US Publication Number 2011/0009471 now U.S. Pat. No. 8,957,201, issued on Feb. 17, 2015, and entitled “Oligonucleotide Analogues And Methods Utilizing The Same”, the entire contents of each of which are incorporated herein by reference for all purposes.

[0316] In some embodiments, the oligonucleotide comprises at least one modified nucleoside that results in an increase in Tm of the oligonucleotide in a range of 1° C., 2° C., 3° C., 4° C., or 5° C. compared with an oligonucleotide that does not have the at least one modified nucleoside. The oligonucleotide may have a plurality of modified nucleosides that result in a total increase in Tm of the oligonucleotide in a range of 2° C., 3° C., 4° C., 5° C., 6° C., 7° C., 8° C., 9° C., 10° C., 15° C., 20° C., 25° C., 30° C., 35° C., 40° C., 45° C. or more compared with an oligonucleotide that does not have the modified nucleoside.

[0317] The oligonucleotide may comprise a mix of nucleosides of different kinds. For example, an oligonucleotide may comprise a mix of 2′-deoxyribonucleosides or ribonucleosides and 2′-fluoro modified nucleosides. An oligonucleotide may comprise a mix of deoxyribonucleosides or ribonucleosides and 2′-O-Me modified nucleosides. An oligonucleotide may comprise a mix of 2′-fluoro modified nucleosides and 2′-O-Me modified nucleosides. An oligonucleotide may comprise a mix of 2′-4′ bicyclic nucleosides and 2′-MOE, 2′-fluoro, or 2′-O-Me modified nucleosides. An oligonucleotide may comprise a mix of non-bicyclic 2′-modified nucleosides (e.g., 2′-MOE, 2′-fluoro, or 2′-O-Me) and 2′-4′ bicyclic nucleosides (e.g., LNA, ENA, cEt).

[0318] The oligonucleotide may comprise alternating nucleosides of different kinds. For example, an oligonucleotide may comprise alternating 2′-deoxyribonucleosides or ribonucleosides and 2′-fluoro modified nucleosides. An oligonucleotide may comprise alternating deoxyribonucleosides or ribonucleosides and 2′-O-Me modified nucleosides. An oligonucleotide may comprise alternating 2′-fluoro modified nucleosides and 2′-O-Me modified nucleosides. An oligonucleotide may comprise alternating 2′-4′ bicyclic nucleosides and 2′-MOE, 2′-fluoro, or 2′-O-Me modified nucleosides. An oligonucleotide may comprise alternating non-bicyclic 2′-modified nucleosides (e.g., 2′-MOE, 2′-fluoro, or 2′-O-Me) and 2′-4′ bicyclic nucleosides (e.g., LNA, ENA, cEt).

[0319] In some embodiments, an oligonucleotide described herein comprises a 5′-vinylphosphonate modification, one or more abasic residues, and/or one or more inverted abasic residues.

d. Internucleoside Linkages/Backbones

[0320] In some embodiments, oligonucleotide may contain a phosphorothioate or other modified internucleoside linkage. In some embodiments, the oligonucleotide comprises phosphorothioate internucleoside linkages. In some embodiments, the oligonucleotide comprises phosphorothioate internucleoside linkages between at least two nucleosides. In some embodiments, the oligonucleotide comprises phosphorothioate internucleoside linkages between all nucleosides. For example, in some embodiments, oligonucleotides comprise modified internucleoside linkages at the first, second, and/or (e.g., and) third internucleoside linkage at the 5′ or 3′ end of the nucleotide sequence.

[0321] Phosphorus-containing linkages that may be used include, but are not limited to, phosphorothioates, chiral phosphorothioates, phosphorodithioates, phosphotriesters, aminoalkylphosphotriesters, methyl and other alkyl phosphonates comprising 3′alkylene phosphonates and chiral phosphonates, phosphinates, phosphoramidates comprising 3′-amino phosphoramidate and aminoalkylphosphoramidates, thionophosphoramidates, thionoalkylphosphonates, thionoalkylphosphotriesters, and boranophosphates having normal 3′-5′ linkages, 2′-5′ linked analogs of these, and those having inverted polarity wherein the adjacent pairs of nucleoside units are linked 3′-5′ to 5′-3′ or 2′-5′ to 5′-2′; see U.S. Pat. Nos. 3,687,808; 4,469,863; 4,476,301; 5,023,243; 5,177,196; 5,188,897; 5,264,423; 5,276,019; 5,278,302; 5,286,717; 5,321,131; 5,399,676; 5,405,939; 5,453,496; 5,455, 233; 5,466,677; 5,476,925; 5,519,126; 5,536,821; 5,541,306; 5,550,111; 5,563, 253; 5,571,799; 5,587,361; and 5,625,050.

[0322] In some embodiments, oligonucleotides may have heteroatom backbones, such as methylene(methylimino) or MMI backbones; amide backbones (see De Mesmaeker et al. Ace. Chem. Res. 1995, 28:366-374); morpholino backbones (see Summerton and Weller, U.S. Pat. No. 5,034,506); or peptide nucleic acid (PNA) backbones (wherein the phosphodiester backbone of the oligonucleotide is replaced with a polyamide backbone, the nucleotides being bound directly or indirectly to the aza nitrogen atoms of the polyamide backbone, see Nielsen et al., Science 1991, 254, 1497).

e. Stereospecific Oligonucleotides

[0323] In some embodiments, internucleotidic phosphorus atoms of oligonucleotides are chiral, and the properties of the oligonucleotides by adjusted based on the configuration of the chiral phosphorus atoms. In some embodiments, appropriate methods may be used to synthesize P-chiral oligonucleotide analogs in a stereocontrolled manner (e.g., as described in Oka N, Wada T, Stereocontrolled synthesis of oligonucleotide analogs containing chiral internucleotidic phosphorus atoms. Chem Soc Rev. 2011 December; 40(12):5829-43.) In some embodiments, phosphorothioate containing oligonucleotides comprise nucleoside units that are joined together by either substantially all Sp or substantially all Rp phosphorothioate intersugar linkages are provided. In some embodiments, such phosphorothioate oligonucleotides having substantially chirally pure intersugar linkages are prepared by enzymatic or chemical synthesis, as described, for example, in U.S. Pat. No. 5,587,261, issued on Dec. 12, 1996, the contents of which are incorporated herein by reference in their entirety. In some embodiments, chirally controlled oligonucleotides provide selective cleavage patterns of a target nucleic acid. For example, in some embodiments, a chirally controlled oligonucleotide provides single site cleavage within a complementary sequence of a nucleic acid, as described, for example, in US Patent Application Publication 20170037399 Al, published on Feb. 2, 2017, entitled “CHIRAL DESIGN”, the contents of which are incorporated herein by reference in their entirety.

f. Morpholinos

[0324] In some embodiments, the oligonucleotide may be a morpholino-based compounds. Morpholino-based oligomeric compounds are described in Dwaine A. Braasch and David R. Corey, Biochemistry, 2002, 41(14), 4503-4510); Genesis, volume 30, issue 3, 2001; Heasman, J., Dev. Biol., 2002, 243, 209-214; Nasevicius et al., Nat. Genet., 2000, 26, 216-220; Lacerra et al., Proc. Natl. Acad. Sci., 2000, 97, 9591-9596; and U.S. Pat. No. 5,034,506, issued Jul. 23, 1991. In some embodiments, the morpholino-based oligomeric compound is a phosphorodiamidate morpholino oligomer (PMO) (e.g., as described in Iverson, Curr. Opin. Mol. Ther., 3:235-238, 2001; and Wang et al., J. Gene Med., 12:354-364, 2010; the disclosures of which are incorporated herein by reference in their entireties).

g. Peptide Nucleic Acids (PNAs)

[0325] In some embodiments, both a sugar and an internucleoside linkage (the backbone) of the nucleotide units of an oligonucleotide are replaced with novel groups. In some embodiments, the base units are maintained for hybridization with an appropriate nucleic acid target compound. One such oligomeric compound, an oligonucleotide mimetic that has been shown to have excellent hybridization properties, is referred to as a peptide nucleic acid (PNA). In PNA compounds, the sugar-backbone of an oligonucleotide is replaced with an amide containing backbone, for example, an aminoethylglycine backbone. The nucleobases are retained and are bound directly or indirectly to aza nitrogen atoms of the amide portion of the backbone. Representative publication that report the preparation of PNA compounds include, but are not limited to, U.S. Pat. Nos. 5,539,082; 5,714,331; and 5,719,262, each of which is herein incorporated by reference. Further teaching of PNA compounds can be found in Nielsen et al., Science, 1991, 254, 1497-1500.

h. Mixmers

[0326] In some embodiments, an oligonucleotide described herein may be a mixmer or comprise a mixmer sequence pattern. In general, mixmers are oligonucleotides that comprise both naturally and non-naturally occurring nucleosides or comprise two different types of non-naturally occurring nucleosides typically in an alternating pattern. Mixmers generally have higher binding affinity than unmodified oligonucleotides and may be used to specifically bind a target molecule, e.g., to block a binding site on the target molecule. Generally, mixmers do not recruit an RNase to the target molecule and thus do not promote cleavage of the target molecule. Such oligonucleotides that are incapable of recruiting RNase H have been described, for example, see WO2007/112754 or WO2007/112753.

[0327] In some embodiments, the mixmer comprises or consists of a repeating pattern of nucleoside analogues and naturally occurring nucleosides, or one type of nucleoside analogue and a second type of nucleoside analogue. However, a mixmer need not comprise a repeating pattern and may instead comprise any arrangement of modified nucleoside s and naturally occurring nucleoside s or any arrangement of one type of modified nucleoside and a second type of modified nucleoside. The repeating pattern, may, for instance be every second or every third nucleoside is a modified nucleoside, such as LNA, and the remaining nucleoside s are naturally occurring nucleosides, such as DNA, or are a 2′ substituted nucleoside analogue such as 2′-MOE or 2′ fluoro analogues, or any other modified nucleoside described herein. It is recognized that the repeating pattern of modified nucleoside, such as LNA units, may be combined with modified nucleoside at fixed positions—e.g. at the 5′ or 3′ termini.

[0328] In some embodiments, a mixmer does not comprise a region of more than 5, more than 4, more than 3, or more than 2 consecutive naturally occurring nucleosides, such as DNA nucleosides. In some embodiments, the mixmer comprises at least a region consisting of at least two consecutive modified nucleosides, such as at least two consecutive LNAs. In some embodiments, the mixmer comprises at least a region consisting of at least three consecutive modified nucleoside units, such as at least three consecutive LNAs.

[0329] In some embodiments, the mixmer does not comprise a region of more than 7, more than 6, more than 5, more than 4, more than 3, or more than 2 consecutive nucleoside analogues, such as LNAs. In some embodiments, LNA units may be replaced with other nucleoside analogues, such as those referred to herein.

[0330] Mixmers may be designed to comprise a mixture of affinity enhancing modified nucleosides, such as in non-limiting example LNA nucleosides and 2′-O-Me nucleosides. In some embodiments, a mixmer comprises modified internucleoside linkages (e.g., phosphorothioate internucleoside linkages or other linkages) between at least two, at least three, at least four, at least five or more nucleosides.

[0331] A mixmer may be produced using any suitable method. Representative U.S. patents, U.S. patent publications, and PCT publications that teach the preparation of mixmers include U.S. patent publication Nos. US20060128646, US20090209748, US20090298916, US20110077288, and US20120322851, and U.S. Pat. No. 7,687,617.

[0332] In some embodiments, a mixmer comprises one or more morpholino nucleosides. For example, in some embodiments, a mixmer may comprise morpholino nucleosides mixed (e.g., in an alternating manner) with one or more other nucleosides (e.g., DNA, RNA nucleosides) or modified nucleosides (e.g., LNA, 2′-O-Me nucleosides).

[0333] In some embodiments, mixmers are useful for splice correcting or exon skipping, for example, as reported in Touznik A., et al., LNA/DNA mixmer-based antisense oligonucleotides correct alternative splicing of the SMN2 gene and restore SMN protein expression in type 1 SMA fibroblasts Scientific Reports, volume 7, Article number: 3672 (2017), Chen S. et al., Synthesis of a Morpholino Nucleic Acid (MNA)-Uridine Phosphoramidite, and Exon Skipping Using MNA/2′-O-Methyl Mixmer Antisense Oligonucleotide, Molecules 2016, 21, 1582, the contents of each which are incorporated herein by reference.

i. Multimers

[0334] In some embodiments, molecular payloads may comprise multimers (e.g., concatemers) of 2 or more oligonucleotides connected by a linker. In this way, in some embodiments, the oligonucleotide loading of a complex can be increased beyond the available linking sites on a targeting agent (e.g., available thiol sites on an antibody) or otherwise tuned to achieve a particular payload loading content. Oligonucleotides in a multimer can be the same or different (e.g., targeting different genes or different sites on the same gene or products thereof).

[0335] In some embodiments, multimers comprise 2 or more oligonucleotides linked together by a cleavable linker. However, in some embodiments, multimers comprise 2 or more oligonucleotides linked together by a non-cleavable linker. In some embodiments, a multimer comprises 2, 3, 4, 5, 6, 7, 8, 9, 10 or more oligonucleotides linked together. In some embodiments, a multimer comprises 2 to 5, 2 to 10 or 4 to 20 oligonucleotides linked together.

[0336] In some embodiments, a multimer comprises 2 or more oligonucleotides linked end-to-end (in a linear arrangement). In some embodiments, a multimer comprises 2 or more oligonucleotides linked end-to-end via an oligonucleotide based linker (e.g., poly-dT linker, an abasic linker). In some embodiments, a multimer comprises a 5′ end of one oligonucleotide linked to a 3′ end of another oligonucleotide. In some embodiments, a multimer comprises a 3′ end of one oligonucleotide linked to a 3′ end of another oligonucleotide. In some embodiments, a multimer comprises a 5′ end of one oligonucleotide linked to a 5′ end of another oligonucleotide. Still, in some embodiments, multimers can comprise a branched structure comprising multiple oligonucleotides linked together by a branching linker.

[0337] Further examples of multimers that may be used in the complexes provided herein are disclosed, for example, in US Patent Application Number 2015/0315588 A1, entitled Methods of delivering multiple targeting oligonucleotides to a cell using cleavable linkers, which was published on Nov. 5, 2015; US Patent Application Number 2015/0247141 A1, entitled Multimeric Oligonucleotide Compounds, which was published on Sep. 3, 2015, US Patent Application Number US 2011/0158937 A1, entitled Immunostimulatory Oligonucleotide Multimers, which was published on Jun. 30, 2011; and U.S. Pat. No. 5,693,773, entitled Triplex-Forming Antisense Oligonucleotides Having Abasic Linkers Targeting Nucleic Acids Comprising Mixed Sequences Of Purines And Pyrimidines, which issued on Dec. 2, 1997, the contents of each of which are incorporated herein by reference in their entireties.

### C. Linkers

[0338] Complexes described herein generally comprise a linker that covalently links any one of the anti-TfR1 antibodies described herein to a molecular payload. A linker comprises at least one covalent bond. In some embodiments, a linker may be a single bond, e.g., a disulfide bond or disulfide bridge, that covalently links an anti-TfR1 antibody to a molecular payload. However, in some embodiments, a linker may covalently link any one of the anti-TfR1 antibodies described herein to a molecular payload through multiple covalent bonds. In some embodiments, a linker may be a cleavable linker. However, in some embodiments, a linker may be a non-cleavable linker. A linker is typically stable in vitro and in vivo, and may be stable in certain cellular environments. Additionally, typically a linker does not negatively impact the functional properties of either the anti-TfR1 antibody or the molecular payload. Examples and methods of synthesis of linkers are known in the art (see, e.g. Kline, T. et al. “Methods to Make Homogenous Antibody Drug Conjugates.” Pharmaceutical Research, 2015, 32:11, 3480-3493.; Jain, N. et al. “Current ADC Linker Chemistry” Pharm Res. 2015, 32:11, 3526-3540.; McCombs, J. R. and Owen, S. C. “Antibody Drug Conjugates: Design and Selection of Linker, Payload and Conjugation Chemistry” AAPS J. 2015, 17:2, 339-351.).

[0339] A linker typically will contain two different reactive species that allow for attachment to both the anti-TfR1 antibody and a molecular payload. In some embodiments, the two different reactive species may be a nucleophile and/or an electrophile. In some embodiments, a linker contains two different electrophiles or nucleophiles that are specific for two different nucleophiles or electrophiles. In some embodiments, a linker is covalently linked to an anti-TfR1 antibody via conjugation to a lysine residue or a cysteine residue of the anti-TfR1 antibody. In some embodiments, a linker is covalently linked to a cysteine residue of an anti-TfR1 antibody via a maleimide-containing linker, wherein optionally the maleimide-containing linker comprises a maleimidocaproyl or maleimidomethyl cyclohexane-1-carboxylate group. In some embodiments, a linker is covalently linked to a cysteine residue of an anti-TfR1 antibody or thiol functionalized molecular payload via a 3-arylpropionitrile functional group. In some embodiments, a linker is covalently linked to a lysine residue of an anti-TfR1 antibody. In some embodiments, a linker is covalently linked to an anti-TfR1 antibody and/or (e.g., and) a molecular payload, independently, via an amide bond, a carbamate bond, a hydrazide, a triazole, a thioether, and/or a disulfide bond.

i. Cleavable Linkers

[0340] A cleavable linker may be a protease-sensitive linker, a pH-sensitive linker, or a glutathione-sensitive linker. These linkers are typically cleavable only intracellularly and are preferably stable in extracellular environments, e.g., extracellular to a muscle cell.

[0341] Protease-sensitive linkers are cleavable by protease enzymatic activity. These linkers typically comprise peptide sequences and may be 2-10 amino acids, about 2-5 amino acids, about 5-10 amino acids, about 10 amino acids, about 5 amino acids, about 3 amino acids, or about 2 amino acids in length. In some embodiments, a peptide sequence may comprise naturally-occurring amino acids, e.g. cysteine, alanine, or non-naturally-occurring or modified amino acids. Non-naturally occurring amino acids include 3-amino acids, homo-amino acids, proline derivatives, 3-substituted alanine derivatives, linear core amino acids, N-methyl amino acids, and others known in the art. In some embodiments, a protease-sensitive linker comprises a valine-citrulline or alanine-citrulline sequence. In some embodiments, a protease-sensitive linker can be cleaved by a lysosomal protease, e.g. cathepsin B, and/or (e.g., and) an endosomal protease.

[0342] A pH-sensitive linker is a covalent linkage that readily degrades in high or low pH environments. In some embodiments, a pH-sensitive linker may be cleaved at a pH in a range of 4 to 6. In some embodiments, a pH-sensitive linker comprises a hydrazone or cyclic acetal. In some embodiments, a pH-sensitive linker is cleaved within an endosome or a lysosome.

[0343] In some embodiments, a glutathione-sensitive linker comprises a disulfide moiety. In some embodiments, a glutathione-sensitive linker is cleaved by a disulfide exchange reaction with a glutathione species inside a cell. In some embodiments, the disulfide moiety further comprises at least one amino acid, e.g., a cysteine residue.

[0344] In some embodiments, a linker comprises a valine-citrulline sequence (e.g., as described in U.S. Pat. No. 6,214,345, incorporated herein by reference). In some embodiments, before conjugation, a linker comprises a structure of:

[chemical structure]

[0345] In some embodiments, after conjugation, a linker comprises a structure of:

[chemical structure]

[0346] In some embodiments, before conjugation, a linker comprises a structure of:

[chemical structure]

wherein n is any number from 0-10. In some embodiments, n is 3.

[0347] In some embodiments, a linker comprises a structure of:

[chemical structure]

wherein n is any number from 0-10, wherein m is any number from 0-10. In some embodiments, n is 3 and/or (e.g., and) m is 4.

[0348] In some embodiments, a linker comprises a structure of:

[chemical structure]

wherein n is any number from 0-10, wherein m is any number from 0-10. In some embodiments, n is 3 and/or (e.g., and) m is 4.
ii. Non-Cleavable Linkers

[0349] In some embodiments, non-cleavable linkers may be used. Generally, a non-cleavable linker cannot be readily degraded in a cellular or physiological environment. In some embodiments, a non-cleavable linker comprises an optionally substituted alkyl group, wherein the substitutions may include halogens, hydroxyl groups, oxygen species, and other common substitutions. In some embodiments, a linker may comprise an optionally substituted alkyl, an optionally substituted alkylene, an optionally substituted arylene, a heteroarylene, a peptide sequence comprising at least one non-natural amino acid, a truncated glycan, a sugar or sugars that cannot be enzymatically degraded, an azide, an alkyne-azide, a peptide sequence comprising a LPXT sequence, a thioether, a biotin, a biphenyl, repeating units of polyethylene glycol or equivalent compounds, acid esters, acid amides, sulfamides, and/or an alkoxy-amine linker. In some embodiments, sortase-mediated ligation can be utilized to covalently link an anti-TfR1 antibody comprising a LPXT sequence to a molecular payload comprising a (G)ₙ sequence (see, e.g. Proft T. Sortase-mediated protein ligation: an emerging biotechnology tool for protein modification and immobilization. Biotechnol Lett. 2010, 32(1):1-10.).

[0350] In some embodiments, a linker may comprise a substituted alkylene, an optionally substituted alkenylene, an optionally substituted alkynylene, an optionally substituted cycloalkylene, an optionally substituted cycloalkenylene, an optionally substituted arylene, an optionally substituted heteroarylene further comprising at least one heteroatom selected from N, O, and S, an optionally substituted heterocyclylene further comprising at least one heteroatom selected from N, O, and S, an imino, an optionally substituted nitrogen species, an optionally substituted oxygen species 0, an optionally substituted sulfur species, or a poly(alkylene oxide), e.g. polyethylene oxide or polypropylene oxide. In some embodiments, a linker may be a non-cleavable N-gamma-maleimidobutyryl-oxysuccinimide ester (GMBS) linker.

iii. Linker Conjugation

[0351] In some embodiments, a linker is covalently linked to an anti-TfR1 antibody and/or (e.g., and) molecular payload via a phosphate, thioether, ether, carbon-carbon, carbamate, or amide bond. In some embodiments, a linker is covalently linked to an oligonucleotide through a phosphate or phosphorothioate group, e.g. a terminal phosphate of an oligonucleotide backbone. In some embodiments, a linker is covalently linked to an anti-TfR1 antibody, through a lysine or cysteine residue present on the anti-TfR1 antibody.

[0352] In some embodiments, a linker, or a portion thereof is covalently linked to an anti-TfR1 antibody and/or (e.g., and) molecular payload by a cycloaddition reaction between an azide and an alkyne to form a triazole, wherein the azide or the alkyne may be located on the anti-TfR1 antibody, molecular payload, or the linker. In some embodiments, an alkyne may be a cyclic alkyne, e.g., a cyclooctyne. In some embodiments, an alkyne may be bicyclononyne (also known as bicyclo[6.1.0]nonyne or BCN) or substituted bicyclononyne. In some embodiments, a cyclooctyne is as described in International Patent Application Publication WO2011136645, published on Nov. 3, 2011, entitled, “Fused Cyclooctyne Compounds And Their Use In Metal-free Click Reactions”. In some embodiments, an azide may be a sugar or carbohydrate molecule that comprises an azide. In some embodiments, an azide may be 6-azido-6-deoxygalactose or 6-azido-N-acetylgalactosamine. In some embodiments, a sugar or carbohydrate molecule that comprises an azide is as described in International Patent Application Publication WO2016170186, published on Oct. 27, 2016, entitled, “Process For The Modification Of A Glycoprotein Using A Glycosyltransferase That Is Or Is Derived From A P(1,4)-N-Acetylgalactosaminyltransferase”. In some embodiments, a cycloaddition reaction between an azide and an alkyne to form a triazole, wherein the azide or the alkyne may be located on the anti-TfR1 antibody, molecular payload, or the linker is as described in International Patent Application Publication WO2014065661, published on May 1, 2014, entitled, “Modified antibody, antibody-conjugate and process for the preparation thereof”; or International Patent Application Publication WO2016170186, published on Oct. 27, 2016, entitled, “Process For The Modification Of A Glycoprotein Using A Glycosyltransferase That Is Or Is Derived From A P(1,4)-N-Acetylgalactosaminyltransferase”.

[0353] In some embodiments, a linker comprises a spacer, e.g., a polyethylene glycol spacer or an acyl/carbomoyl sulfamide spacer, e.g., a HydraSpace™ spacer. In some embodiments, a spacer is as described in Verkade, J. M. M. et al., “A Polar Sulfamide Spacer Significantly Enhances the Manufacturability, Stability, and Therapeutic Index of Antibody-Drug Conjugates”, Antibodies, 2018, 7, 12.

[0354] In some embodiments, a linker is covalently linked to an anti-TfR1 antibody and/or (e.g., and) molecular payload by the Diels-Alder reaction between a dienophile and a diene/hetero-diene, wherein the dienophile or the diene/hetero-diene may be located on the anti-TfR1 antibody, molecular payload, or the linker. In some embodiments a linker is covalently linked to an anti-TfR1 antibody and/or (e.g., and) molecular payload by other pericyclic reactions such as an ene reaction. In some embodiments, a linker is covalently linked to an anti-TfR1 antibody and/or (e.g., and) molecular payload by an amide, thioamide, or sulfonamide bond reaction. In some embodiments, a linker is covalently linked to an anti-TfR1 antibody and/or (e.g., and) molecular payload by a condensation reaction to form an oxime, hydrazone, or semicarbazide group existing between the linker and the anti-TfR1 antibody and/or (e.g., and) molecular payload.

[0355] In some embodiments, a linker is covalently linked to an anti-TfR1 antibody and/or (e.g., and) molecular payload by a conjugate addition reaction between a nucleophile, e.g. an amine or a hydroxyl group, and an electrophile, e.g. a carboxylic acid, carbonate, or an aldehyde. In some embodiments, a nucleophile may exist on a linker and an electrophile may exist on an anti-TfR1 antibody or molecular payload prior to a reaction between a linker and an anti-TfR1 antibody or molecular payload. In some embodiments, an electrophile may exist on a linker and a nucleophile may exist on an anti-TfR1 antibody or molecular payload prior to a reaction between a linker and an anti-TfR1 antibody or molecular payload. In some embodiments, an electrophile may be an azide, pentafluorophenyl, a silicon centers, a carbonyl, a carboxylic acid, an anhydride, an isocyanate, a thioisocyanate, a succinimidyl ester, a sulfosuccinimidyl ester, a maleimide, an alkyl halide, an alkyl pseudohalide, an epoxide, an episulfide, an aziridine, an aryl, an activated phosphorus center, and/or an activated sulfur center. In some embodiments, a nucleophile may be an optionally substituted alkene, an optionally substituted alkyne, an optionally substituted aryl, an optionally substituted heterocyclyl, a hydroxyl group, an amino group, an alkylamino group, an anilido group, and/or a thiol group.

[0356] In some embodiments, a linker comprises a valine-citrulline sequence covalently linked to a reactive chemical moiety (e.g., an azide moiety or a BCN moiety for click chemistry). In some embodiments, a linker comprising a valine-citrulline sequence covalently linked to a reactive chemical moiety (e.g., an azide moiety for click chemistry) comprises a structure of:

[chemical structure]

wherein n is any number from 0-10. In some embodiments, n is 3.

[0357] In some embodiments, a linker comprising the structure of Formula (A) is covalently linked (e.g., optionally via additional chemical moieties) to a molecular payload (e.g., an oligonucleotide). In some embodiments, a linker comprising the structure of Formula (A) is covalently linked to an oligonucleotide, e.g., through a nucleophilic substitution with amine-L1-oligonucleotides forming a carbamate bond, yielding a compound comprising a structure of:

[chemical structure]

wherein n is any number from 0-10. In some embodiments, n is 3.

[0358] In some embodiments, the compound of Formula (B) is further covalently linked via a triazole to additional moieties, wherein the triazole is formed by a click reaction between the azide of Formula (A) or Formula (B) and an alkyne provided on a bicyclononyne. In some embodiments, a compound comprising a bicyclononyne comprises a structure of:

[chemical structure]

wherein m is any number from 0-10. In some embodiments, m is 4.

[0359] In some embodiments, the azide of the compound of structure (B) forms a triazole via a click reaction with the alkyne of the compound of structure (C), forming a compound comprising a structure of:

[chemical structure]

wherein n is any number from 0-10, and wherein m is any number from 0-10. In some embodiments, n is 3 and m is 4.

[0360] In some embodiments, the compound of structure (D) is further covalently linked to a lysine of the anti-TfR1 antibody, forming a complex comprising a structure of:

[chemical structure]

wherein n is any number from 0-10, wherein m is any number from 0-10. In some embodiments, n is 3 and/or (e.g., and) m is 4. It should be understood that the amide shown adjacent the anti-TfR1 antibody in Formula (E) results from a reaction with an amine of the anti-TfR1 antibody, such as a lysine epsilon amine.

[0361] In some embodiments, the compound of Formula (C) is further covalently linked to a lysine of the anti-TfR1 antibody, forming a compound comprising a structure of:

[chemical structure]

wherein m is 0-15 (e.g., 4). It should be understood that the amide shown adjacent the anti-TfR1 antibody in Formula (F) results from a reaction with an amine of the anti-TfR1 antibody, such as a lysine epsilon amine.

[0362] In some embodiments, the azide of the compound of structure (B) forms a triazole via a click reaction with the alkyne of the compound of structure (F), forming a complex comprising a structure of:

[chemical structure]

wherein n is any number from 0-10, wherein m is any number from 0-10. In some embodiments, n is 3 and/or (e.g., and) m is 4. It should be understood that the amide shown adjacent the anti-TfR1 antibody in Formula (E) results from a reaction with an amine of the anti-TfR1 antibody, such as a lysine epsilon amine.

[0363] In some embodiments, the azide of the compound of structure (A) forms a triazole via a click reaction with the alkyne of the compound of structure (F), forming a compound comprising a structure of:

[chemical structure]

wherein n is any number from 0-10, wherein m is any number from 0-10. In some embodiments, n is 3 and/or (e.g., and) m is 4. In some embodiments, an oligonucleotide is covalently linked to a compound comprising a structure of formula (G), thereby forming a complex comprising a structure of formula (E). It should be understood that the amide shown adjacent the anti-TfR1 antibody in Formula (G) results from a reaction with an amine of the anti-TfR1 antibody, such as a lysine epsilon amine.

[0364] In some embodiments, in any one of the complexes described herein, the anti-TfR1 antibody is covalently linked via a lysine of the anti-TfR1 antibody to a molecular payload (e.g., an oligonucleotide) via a linker comprising a structure of:

[chemical structure]

wherein n is any number from 0-10, wherein m is any number from 0-10. In some embodiments, n is 3 and/or (e.g., and) m is 4.

[0365] In some embodiments, in any one of the complexes described herein, the anti-TfR1 antibody is covalently linked via a lysine of the anti-TfR1 antibody to a molecular payload (e.g., an oligonucleotide) via a linker comprising a structure of:

[chemical structure]

wherein n is any number from 0-10, wherein m is any number from 0-10. In some embodiments, n is 3 and/or (e.g., and) m is 4.

[0366] In some embodiments, in formulae (B), (D), (E), and (I), L1 is a spacer that is a substituted or unsubstituted aliphatic, substituted or unsubstituted heteroaliphatic, substituted or unsubstituted carbocyclylene, substituted or unsubstituted heterocyclylene, substituted or unsubstituted arylene, substituted or unsubstituted heteroarylene, —O—, —N(R^{A})—, —S—, —C(═O)—, —C(═O)O—, —C(═O)NR^{A}—, —NR^{A}C(═O)—, —NR^{A}C(═O)R^{A}—, —C(═O)R^{A}—, —NR^{A}C(═O)O—, —NR^{A}C(═O)N(R^{A})—, —OC(═O)—, —OC(═O)O—, —OC(═O)N(R^{A})—, —S(O)₂NR^{A}—, —NR^{A}S(O)₂—, or a combination thereof, wherein each R^{A} is independently hydrogen or substituted or unsubstituted alkyl. In some embodiments, L1 is

[chemical structure]

wherein L2 is

[chemical structure]

wherein a labels the site directly linked to the carbamate moiety of formulae (B), (D), (E), and (I); and b labels the site covalently linked (directly or via additional chemical moieties) to the oligonucleotide.

[0367] In some embodiments, L1 is:

[chemical structure]

wherein a labels the site directly linked to the carbamate moiety of formulae (B), (D), (E), and (I); and b labels the site covalently linked (directly or via additional chemical moieties) to the oligonucleotide.

[0368] In some embodiments, L1 is

[chemical structure]

[0369] In some embodiments, L1 is linked to a 5′ phosphate of the oligonucleotide. In some embodiments, the phosphate is a phosphodiester. In some embodiments, L1 is linked to a 5′ phosphorothioate of the oligonucleotide. In some embodiments, L1 is linked to a 5′ phosphonoamidate of the oligonucleotide. In some embodiments, L1 is linked via a phosphorodiamidate linkage to the 5′ end of the oligonucleotide.

[0370] In some embodiments, L1 is optional (e.g., need not be present).

[0371] In some embodiments, any one of the complexes described herein has a structure of:

[chemical structure]

wherein n is 0-15 (e.g., 3) and m is 0-15 (e.g., 4). It should be understood that the amide shown adjacent the anti-TfR1 antibody in Formula (J) results from a reaction with an amine of the anti-TfR1 antibody, such as a lysine epsilon amine.

[0372] In some embodiments, any one of the complexes described herein has a structure of:

[chemical structure]

wherein n is 0-15 (e.g., 3) and m is 0-15 (e.g., 4).

[0373] In some embodiments, the oligonucleotide is modified to comprise an amine group at the 5′ end, the 3′ end, or internally (e.g., as an amine functionalized nucleobase), prior to linking to a compound, e.g., a compound of formula (A) or formula (G).

[0374] Although linker conjugation is described in the context of anti-TfR1 antibodies and oligonucleotide molecular payloads, it should be understood that use of such linker conjugation on other muscle-targeting agents, such as other muscle-targeting antibodies, and/or on other molecular payloads is contemplated.

### D. Examples of Antibody-Molecular Payload Complexes

[0375] Further provided herein are non-limiting examples of complexes comprising any one the anti-TfR1 antibodies described herein covalently linked to any of the molecular payloads (e.g., an oligonucleotide) described herein. In some embodiments, the anti-TfR1 antibody (e.g., any one of the anti-TfR1 antibodies provided in Tables 2-7) is covalently linked to a molecular payload (e.g., an oligonucleotide such as the oligonucleotides provided in Table 8) via a linker. Any of the linkers described herein may be used. In some embodiments, if the molecular payload is an oligonucleotide, the linker is linked to the 5′ end of the oligonucleotide, the 3′ end of the oligonucleotide, or to an internal site of the oligonucleotide. In some embodiments, the linker is linked to the anti-TfR1 antibody via a thiol-reactive linkage (e.g., via a cysteine in the anti-TfR1 antibody). In some embodiments, the linker (e.g., a linker comprising a valine-citrulline sequence) is linked to the antibody (e.g., an anti-TfR1 antibody described herein) via an amine group (e.g., via a lysine in the antibody). In some embodiments, the molecular payload is a DMD-targeting oligonucleotide (e.g., a DMD-targeting oligonucleotide listed in Table 8, provided by any one of SEQ ID NO: 780-2019, or complementary to any one of SEQ ID NO: 160-779).

[0376] An example of a structure of a complex comprising an anti-TfR1 antibody covalently linked to a molecular payload via a linker is provided below:

[chemical structure]

wherein the linker is linked to the antibody via a thiol-reactive linkage (e.g., via a cysteine in the antibody). In some embodiments, the molecular payload is a DMD-targeting oligonucleotide (e.g., a DMD-targeting oligonucleotide listed in Table 8, provided by any one of SEQ ID NO: 780-2019, or complementary to any one of SEQ ID NO: 160-779).

[0377] Another example of a structure of a complex comprising an anti-TfR1 antibody covalently linked to a molecular payload via a linker is provided below:

[chemical structure]

wherein n is a number between 0-10, wherein m is a number between 0-10, wherein the linker is linked to the antibody via an amine group (e.g., on a lysine residue), and/or (e.g., and) wherein the linker is linked to the oligonucleotide (e.g., at the 5′ end, 3′ end, or internally). In some embodiments, the linker is linked to the antibody via a lysine, the linker is linked to the oligonucleotide at the 5′ end, n is 3, and m is 4. In some embodiments, the molecular payload is a DMD-targeting oligonucleotide (e.g., a DMD-targeting oligonucleotide listed in Table 8, provided by any one of SEQ ID NO: 780-2019, or complementary to any one of SEQ ID NO: 160-779). It should be understood that the amide shown adjacent the anti-TfR1 antibody in Formula (E) results from a reaction with an amine of the anti-TfR1 antibody, such as a lysine epsilon amine.

[0378] It should be appreciated that antibodies can be linked to molecular payloads with different stoichiometries, a property that may be referred to as a drug to antibody ratios (DAR) with the “drug” being the molecular payload. In some embodiments, one molecular payload is linked to an antibody (DAR=1). In some embodiments, two molecular payloads are linked to an antibody (DAR=2). In some embodiments, three molecular payloads are linked to an antibody (DAR=3). In some embodiments, four molecular payloads are linked to an antibody (DAR=4). In some embodiments, a mixture of different complexes, each having a different DAR, is provided. In some embodiments, an average DAR of complexes in such a mixture may be in a range of 1 to 3, 1 to 4, 1 to 5 or more. An average DAR of complexes in a mixture need not be an integer value. DAR may be increased by conjugating molecular payloads to different sites on an antibody and/or (e.g., and) by conjugating multimers to one or more sites on antibody. For example, a DAR of 2 may be achieved by conjugating a single molecular payload to two different sites on an antibody or by conjugating a dimer molecular payload to a single site of an antibody.

[0379] In some embodiments, the complex described herein comprises an anti-TfR1 antibody described herein (e.g., the antibodies provided in Tables 2-7) covalently linked to a molecular payload. In some embodiments, the complex described herein comprises an anti-TfR1 antibody described herein (e.g., the antibodies provided in Tables 2-7) covalently linked to molecular payload via a linker (e.g., a linker comprising a valine-citrulline sequence). In some embodiments, the linker (e.g., a linker comprising a valine-citrulline sequence) is linked to the antibody (e.g., an anti-TfR1 antibody described herein) via a thiol-reactive linkage (e.g., via a cysteine in the antibody). In some embodiments, the linker (e.g., a linker comprising a valine-citrulline sequence) is linked to the antibody (e.g., an anti-TfR1 antibody described herein) via an amine group (e.g., via a lysine in the antibody). In some embodiments, the molecular payload is a DMD-targeting oligonucleotide (e.g., a DMD-targeting oligonucleotide listed in Table 8, provided by any one of SEQ ID NO: 780-2019, or complementary to any one of SEQ ID NO: 160-779).

[0380] In some embodiments, the complex described herein comprises an anti-TfR1 antibody covalently linked to a molecular payload, wherein the anti-TfR1 antibody comprises a CDR-H1, a CDR-H2, a CDR-H3, a CDR-L1, a CDR-L2, and a CDR-L3 of any one of the antibodies listed in Table 2. In some embodiments, the molecular payload is a DMD-targeting oligonucleotide (e.g., a DMD-targeting oligonucleotide listed in Table 8, provided by any one of SEQ ID NO: 780-2019, or complementary to any one of SEQ ID NO: 160-779).

[0381] In some embodiments, the complex described herein comprises an anti-TfR1 antibody covalently linked to a molecular payload, wherein the anti-TfR1 antibody comprises a VH comprising the amino acid sequence of SEQ ID NO: 69, SEQ ID NO: 71, or SEQ ID NO: 72, and a VL comprising the amino acid sequence of SEQ ID NO: 70. In some embodiments, the molecular payload is a DMD-targeting oligonucleotide (e.g., a DMD-targeting oligonucleotide listed in Table 8, provided by any one of SEQ ID NO: 780-2019, or complementary to any one of SEQ ID NO: 160-779).

[0382] In some embodiments, the complex described herein comprises an anti-TfR1 antibody covalently linked to a molecular payload, wherein the anti-TfR1 antibody comprises a VH comprising the amino acid sequence of SEQ ID NO: 73 or SEQ ID NO: 76, and a VL comprising the amino acid sequence of SEQ ID NO: 74. In some embodiments, the molecular payload is a DMD-targeting oligonucleotide (e.g., a DMD-targeting oligonucleotide listed in Table 8, provided by any one of SEQ ID NO: 780-2019, or complementary to any one of SEQ ID NO: 160-779).

[0383] In some embodiments, the complex described herein comprises an anti-TfR1 antibody covalently linked to a molecular payload, wherein the anti-TfR1 antibody comprises a VH comprising the amino acid sequence of SEQ ID NO: 73 or SEQ ID NO: 76, and a VL comprising the amino acid sequence of SEQ ID NO: 75. In some embodiments, the molecular payload is a DMD-targeting oligonucleotide (e.g., a DMD-targeting oligonucleotide listed in Table 8, provided by any one of SEQ ID NO: 780-2019, or complementary to any one of SEQ ID NO: 160-779).

[0384] In some embodiments, the complex described herein comprises an anti-TfR1 antibody covalently linked to a molecular payload, wherein the anti-TfR1 antibody comprises a VH comprising the amino acid sequence of SEQ ID NO: 77, and a VL comprising the amino acid sequence of SEQ ID NO: 78. In some embodiments, the molecular payload is a DMD-targeting oligonucleotide (e.g., a DMD-targeting oligonucleotide listed in Table 8, provided by any one of SEQ ID NO: 780-2019, or complementary to any one of SEQ ID NO: 160-779).

[0385] In some embodiments, the complex described herein comprises an anti-TfR1 antibody covalently linked to a molecular payload, wherein the anti-TfR1 antibody comprises a VH comprising the amino acid sequence of SEQ ID NO: 77 or SEQ ID NO: 79, and a VL comprising the amino acid sequence of SEQ ID NO: 80. In some embodiments, the molecular payload is a DMD-targeting oligonucleotide (e.g., a DMD-targeting oligonucleotide listed in Table 8, provided by any one of SEQ ID NO: 780-2019, or complementary to any one of SEQ ID NO: 160-779).

[0386] In some embodiments, the complex described herein comprises an anti-TfR1 antibody covalently linked to a molecular payload, wherein the anti-TfR1 antibody comprises a VH comprising the amino acid sequence of SEQ ID NO: 154, and a VL comprising the amino acid sequence of SEQ ID NO: 155. In some embodiments, the molecular payload is a DMD-targeting oligonucleotide (e.g., a DMD-targeting oligonucleotide listed in Table 8, provided by any one of SEQ ID NO: 780-2019, or complementary to any one of SEQ ID NO: 160-779).

[0387] In some embodiments, the complex described herein comprises an anti-TfR1 antibody covalently linked to a molecular payload, wherein the anti-TfR1 antibody comprises a heavy chain comprising the amino acid sequence of SEQ ID NO: 84, SEQ ID NO: 86 or SEQ ID NO: 87 and a light chain comprising the amino acid sequence of SEQ ID NO: 85. In some embodiments, the molecular payload is a DMD-targeting oligonucleotide (e.g., a DMD-targeting oligonucleotide listed in Table 8, provided by any one of SEQ ID NO: 780-2019, or complementary to any one of SEQ ID NO: 160-779).

[0388] In some embodiments, the complex described herein comprises an anti-TfR1 antibody covalently linked to a molecular payload, wherein the anti-TfR1 antibody comprises a heavy chain comprising the amino acid sequence of SEQ ID NO: 88 or SEQ ID NO: 91, and a light chain comprising the amino acid sequence of SEQ ID NO: 89. In some embodiments, the molecular payload is a DMD-targeting oligonucleotide (e.g., a DMD-targeting oligonucleotide listed in Table 8, provided by any one of SEQ ID NO: 780-2019, or complementary to any one of SEQ ID NO: 160-779).

[0389] In some embodiments, the complex described herein comprises an anti-TfR1 antibody covalently linked to a molecular payload, wherein the anti-TfR1 antibody comprises a heavy chain comprising the amino acid sequence of SEQ ID NO: 88 or SEQ ID NO: 91, and a light chain comprising the amino acid sequence of SEQ ID NO: 90. In some embodiments, the molecular payload is a DMD-targeting oligonucleotide (e.g., a DMD-targeting oligonucleotide listed in Table 8, provided by any one of SEQ ID NO: 780-2019, or complementary to any one of SEQ ID NO: 160-779).

[0390] In some embodiments, the complex described herein comprises an anti-TfR1 antibody covalently linked to a molecular payload, wherein the anti-TfR1 antibody comprises a heavy chain comprising the amino acid sequence of SEQ ID NO: 92 or SEQ ID NO: 94, and a light chain comprising the amino acid sequence of SEQ ID NO: 95. In some embodiments, the molecular payload is a DMD-targeting oligonucleotide (e.g., a DMD-targeting oligonucleotide listed in Table 8, provided by any one of SEQ ID NO: 780-2019, or complementary to any one of SEQ ID NO: 160-779).

[0391] In some embodiments, the complex described herein comprises an anti-TfR1 antibody covalently linked to a molecular payload, wherein the anti-TfR1 antibody comprises a heavy chain comprising the amino acid sequence of SEQ ID NO: 92, and a light chain comprising the amino acid sequence of SEQ ID NO: 93. In some embodiments, the molecular payload is a DMD-targeting oligonucleotide (e.g., a DMD-targeting oligonucleotide listed in Table 8, provided by any one of SEQ ID NO: 780-2019, or complementary to any one of SEQ ID NO: 160-779).

[0392] In some embodiments, the complex described herein comprises an anti-TfR1 antibody covalently linked to a molecular payload, wherein the anti-TfR1 antibody comprises a heavy chain comprising the amino acid sequence of SEQ ID NO: 156, and a light chain comprising the amino acid sequence of SEQ ID NO: 157. In some embodiments, the molecular payload is a DMD-targeting oligonucleotide (e.g., a DMD-targeting oligonucleotide listed in Table 8, provided by any one of SEQ ID NO: 780-2019, or complementary to any one of SEQ ID NO: 160-779).

[0393] In some embodiments, the complex described herein comprises an anti-TfR1 antibody covalently linked to a molecular payload, wherein the anti-TfR1 antibody comprises a heavy chain comprising the amino acid sequence of SEQ ID NO: 97, SEQ ID NO: 98, or SEQ ID NO: 99 and a light chain comprising the amino acid sequence of SEQ ID NO: 85. In some embodiments, the molecular payload is a DMD-targeting oligonucleotide (e.g., a DMD-targeting oligonucleotide listed in Table 8, provided by any one of SEQ ID NO: 780-2019, or complementary to any one of SEQ ID NO: 160-779).

[0394] In some embodiments, the complex described herein comprises an anti-TfR1 antibody covalently linked to a molecular payload, wherein the anti-TfR1 antibody comprises a heavy chain comprising the amino acid sequence of SEQ ID NO: 100 or SEQ ID NO: 101 and a light chain comprising the amino acid sequence of SEQ ID NO: 89. In some embodiments, the molecular payload is a DMD-targeting oligonucleotide (e.g., a DMD-targeting oligonucleotide listed in Table 8, provided by any one of SEQ ID NO: 780-2019, or complementary to any one of SEQ ID NO: 160-779).

[0395] In some embodiments, the complex described herein comprises an anti-TfR1 antibody covalently linked to a molecular payload, wherein the anti-TfR1 antibody comprises a heavy chain comprising the amino acid sequence of SEQ ID NO: 100 or SEQ ID NO: 101 and a light chain comprising the amino acid sequence of SEQ ID NO: 90. In some embodiments, the molecular payload is a DMD-targeting oligonucleotide (e.g., a DMD-targeting oligonucleotide listed in Table 8, provided by any one of SEQ ID NO: 780-2019, or complementary to any one of SEQ ID NO: 160-779).

[0396] In some embodiments, the complex described herein comprises an anti-TfR1 antibody covalently linked to a molecular payload, wherein the anti-TfR1 antibody comprises a heavy chain comprising the amino acid sequence of SEQ ID NO: 102 and a light chain comprising the amino acid sequence of SEQ ID NO: 93. In some embodiments, the molecular payload is a DMD-targeting oligonucleotide (e.g., a DMD-targeting oligonucleotide listed in Table 8, provided by any one of SEQ ID NO: 780-2019, or complementary to any one of SEQ ID NO: 160-779).

[0397] In some embodiments, the complex described herein comprises an anti-TfR1 antibody covalently linked to a molecular payload, wherein the anti-TfR1 antibody comprises a heavy chain comprising the amino acid sequence of SEQ ID NO: 102 or SEQ ID NO: 103 and a light chain comprising the amino acid sequence of SEQ ID NO: 95. In some embodiments, the molecular payload is a DMD-targeting oligonucleotide (e.g., a DMD-targeting oligonucleotide listed in Table 8, provided by any one of SEQ ID NO: 780-2019, or complementary to any one of SEQ ID NO: 160-779).

[0398] In some embodiments, the complex described herein comprises an anti-TfR1 antibody covalently linked to a molecular payload, wherein the anti-TfR1 antibody comprises a heavy chain comprising the amino acid sequence of SEQ ID NO: 158 or SEQ ID NO: 159 and a light chain comprising the amino acid sequence of SEQ ID NO: 157. In some embodiments, the molecular payload is a DMD-targeting oligonucleotide (e.g., a DMD-targeting oligonucleotide listed in Table 8, provided by any one of SEQ ID NO: 780-2019, or complementary to any one of SEQ ID NO: 160-779).

[0399] In any of the example complexes described herein, in some embodiments, the anti-TfR1 antibody is covalently linked to the molecular payload via a linker comprising a structure of:

[chemical structure]

wherein n is 3, m is 4.

[0400] In some embodiments, the complex described herein comprises an anti-TfR1 antibody covalently linked to the 5′ end of a DMD-targeting oligonucleotide (e.g., a DMD-targeting oligonucleotide listed in Table 8, provided by any one of SEQ ID NO: 780-2019, or complementary to any one of SEQ ID NO: 160-779) via a lysine in the anti-TfR1 antibody, wherein the anti-TfR1 antibody comprises a CDR-H1, a CDR-H2, a CDR-H3, a CDR-L1, a CDR-L2, and a CDR-L3 of any one of the antibodies listed in Table 2, wherein the complex has a structure of:

[chemical structure]

wherein n is 3 and m is 4. It should be understood that the amide shown adjacent the anti-TfR1 antibody in Formula (E) results from a reaction with an amine of the anti-TfR1 antibody, such as a lysine epsilon amine.

[0401] In some embodiments, the complex described herein comprises an anti-TfR1 antibody covalently linked to the 5′ end of a DMD-targeting oligonucleotide (e.g., a DMD-targeting oligonucleotide listed in Table 8, provided by any one of SEQ ID NO: 780-2019, or complementary to any one of SEQ ID NO: 160-779) via a lysine in the anti-TfR1 antibody, wherein the anti-TfR1 antibody comprises a VH and VL of any one of the antibodies listed in Table 3, wherein the complex has a structure of:

[chemical structure]

wherein n is 3 and m is 4. It should be understood that the amide shown adjacent the anti-TfR1 antibody in Formula (E) results from a reaction with an amine of the anti-TfR1 antibody, such as a lysine epsilon amine.

[0402] In some embodiments, the complex described herein comprises an anti-TfR1 antibody covalently linked to the 5′ end of a DMD-targeting oligonucleotide (e.g., a DMD-targeting oligonucleotide listed in Table 8, provided by any one of SEQ ID NO: 780-2019, or complementary to any one of SEQ ID NO: 160-779) via a lysine in the anti-TfR1 antibody, wherein the anti-TfR1 antibody comprises a heavy chain and light chain of any one of the antibodies listed in Table 4, wherein the complex has a structure of:

[chemical structure]

wherein n is 3 and m is 4. It should be understood that the amide shown adjacent the anti-TfR1 antibody in Formula (E) results from a reaction with an amine of the anti-TfR1 antibody, such as a lysine epsilon amine.

[0403] In some embodiments, the complex described herein comprises an anti-TfR1 Fab covalently linked to the 5′ end of a DMD-targeting oligonucleotide (e.g., a DMD-targeting oligonucleotide listed in Table 8, provided by any one of SEQ ID NO: 780-2019, or complementary to any one of SEQ ID NO: 160-779) via a lysine in the anti-TfR1 antibody, wherein the anti-TfR1 Fab comprises a heavy chain and light chain of any one of the antibodies listed in Table 5, wherein the complex has a structure of:

[chemical structure]

wherein n is 3 and m is 4. It should be understood that the amide shown adjacent the anti-TfR1 antibody in Formula (E) results from a reaction with an amine of the anti-TfR1 antibody, such as a lysine epsilon amine.

[0404] In some embodiments, in any one of the examples of complexes described herein, L1 is:

[chemical structure]

wherein L2 is

[chemical structure]

wherein a labels the site directly linked to the carbamate moiety of formulae (B), (D), (E), and (I); and b labels the site covalently linked (directly or via additional chemical moieties) to the oligonucleotide.

[0405] In some embodiments, L1 is:

[chemical structure]

wherein a labels the site directly linked to the carbamate moiety of formulae (B), (D), (E), and (I); and b labels the site covalently linked (directly or via additional chemical moieties) to the oligonucleotide.

[0406] In some embodiments, L1 is linked to a 5′ phosphate of the oligonucleotide. In some embodiments, the phosphate is a phosphodiester. In some embodiments, L1 is linked to a 5′ phosphorothioate of the oligonucleotide. In some embodiments, L1 is linked to a 5′ phosphonoamidate of the oligonucleotide. In some embodiments, L1 is linked via a phosphorodiamidate linkage to the 5′ end of the oligonucleotide.

[0407] In some embodiments, L1 is optional (e.g., need not be present).

### III. Formulations

[0408] Complexes provided herein may be formulated in any suitable manner. Generally, complexes provided herein are formulated in a manner suitable for pharmaceutical use. For example, complexes can be delivered to a subject using a formulation that minimizes degradation, facilitates delivery and/or (e.g., and) uptake, or provides another beneficial property to the complexes in the formulation. In some embodiments, provided herein are compositions comprising complexes and pharmaceutically acceptable carriers. Such compositions can be suitably formulated such that when administered to a subject, either into the immediate environment of a target cell or systemically, a sufficient amount of the complexes enter target muscle cells. In some embodiments, complexes are formulated in buffer solutions such as phosphate-buffered saline solutions, liposomes, micellar structures, and capsids.

[0409] It should be appreciated that, in some embodiments, compositions may include separately one or more components of complexes provided herein (e.g., muscle-targeting agents, linkers, molecular payloads, or precursor molecules of any one of them).

[0410] In some embodiments, complexes are formulated in water or in an aqueous solution (e.g., water with pH adjustments). In some embodiments, complexes are formulated in basic buffered aqueous solutions (e.g., PBS). In some embodiments, formulations as disclosed herein comprise an excipient. In some embodiments, an excipient confers to a composition improved stability, improved absorption, improved solubility and/or (e.g., and) therapeutic enhancement of the active ingredient. In some embodiments, an excipient is a buffering agent (e.g., sodium citrate, sodium phosphate, a tris base, or sodium hydroxide) or a vehicle (e.g., a buffered solution, petrolatum, dimethyl sulfoxide, or mineral oil).

[0411] In some embodiments, a complex or component thereof (e.g., oligonucleotide or antibody) is lyophilized for extending its shelf-life and then made into a solution before use (e.g., administration to a subject). Accordingly, an excipient in a composition comprising a complex, or component thereof, described herein may be a lyoprotectant (e.g., mannitol, lactose, polyethylene glycol, or polyvinyl pyrolidone), or a collapse temperature modifier (e.g., dextran, ficoll, or gelatin).

[0412] In some embodiments, a pharmaceutical composition is formulated to be compatible with its intended route of administration. Examples of routes of administration include parenteral, e.g., intravenous, intradermal, subcutaneous, administration. Typically, the route of administration is intravenous or subcutaneous.

[0413] Pharmaceutical compositions suitable for injectable use include sterile aqueous solutions (where water soluble) or dispersions and sterile powders for the extemporaneous preparation of sterile injectable solutions or dispersions. The carrier can be a solvent or dispersion medium containing, for example, water, ethanol, polyol (for example, glycerol, propylene glycol, and liquid polyethylene glycol, and the like), and suitable mixtures thereof. In some embodiments, formulations include isotonic agents, for example, sugars, polyalcohols such as mannitol, sorbitol, and sodium chloride in the composition. Sterile injectable solutions can be prepared by incorporating the complexes in a required amount in a selected solvent with one or a combination of ingredients enumerated above, as required, followed by filtered sterilization.

[0414] In some embodiments, a composition may contain at least about 0.1% of the complex, or component thereof, or more, although the percentage of the active ingredient(s) may be between about 1% and about 80% or more of the weight or volume of the total composition. Factors such as solubility, bioavailability, biological half-life, route of administration, product shelf life, as well as other pharmacological considerations will be contemplated by one skilled in the art of preparing such pharmaceutical formulations, and as such, a variety of dosages and treatment regimens may be desirable.

### IV. Methods of Use/Treatment

[0415] Complexes comprising a muscle-targeting agent covalently linked to a molecular payload as described herein are effective in treating a subject having a dystrophinopathy, e.g., Duchenne muscular dystrophy. In some embodiments, complexes comprise a molecular payload that is an oligonucleotide, e.g., an antisense oligonucleotide that facilitates exon skipping of a pre-mRNA expressed from a mutated DMD allele.

[0416] In some embodiments, a subject may be a human subject, a non-human primate subject, a rodent subject, or any suitable mammalian subject. In some embodiments, a subject may have Duchenne muscular dystrophy or other dystrophinopathy. In some embodiments, a subject has a mutated DMD allele, which may optionally comprise at least one mutation in a DMD exon that causes a frameshift mutation and leads to improper RNA splicing/processing. In some embodiments, a subject is suffering from symptoms of a severe dystrophinopathy, e.g. muscle atrophy or muscle loss. In some embodiments, a subject has an asymptomatic increase in serum concentration of creatine phosphokinase (CK) and/or (e.g., and) muscle cramps with myoglobinuria. In some embodiments, a subject has a progressive muscle disease, such as Duchenne or Becker muscular dystrophy or DMD-associated dilated cardiomyopathy (DCM). In some embodiments, a subject is not suffering from symptoms of a dystrophinopathy.

[0417] In some embodiments, a subject has a mutation in a DMD gene that is amenable to exon 55 skipping. In some embodiments, a complex comprising a muscle-targeting agent covalently linked to a molecular payload as described herein is effective in treating a subject having a mutation in a DMD gene that is amenable to exon 55 skipping. In some embodiments, a complex comprises a molecular payload that is an oligonucleotide, e.g., an antisense oligonucleotide that facilitates skipping of exon 55 of a pre-mRNA, such as in a pre-mRNA encoded from a mutated DMD gene (e.g., a mutated DMD gene that is amenable to exon 55 skipping).

[0418] An aspect of the disclosure includes methods involving administering to a subject an effective amount of a complex as described herein. In some embodiments, an effective amount of a pharmaceutical composition that comprises a complex comprising a muscle-targeting agent covalently linked to a molecular payload can be administered to a subject in need of treatment. In some embodiments, a pharmaceutical composition comprising a complex as described herein may be administered by a suitable route, which may include intravenous administration, e.g., as a bolus or by continuous infusion over a period of time. In some embodiments, administration may be performed by intramuscular, intraperitoneal, intracerebrospinal, subcutaneous, intra-articular, intrasynovial, or intrathecal routes. In some embodiments, a pharmaceutical composition may be in solid form, aqueous form, or a liquid form. In some embodiments, an aqueous or liquid form may be nebulized or lyophilized. In some embodiments, a nebulized or lyophilized form may be reconstituted with an aqueous or liquid solution.

[0419] Compositions for intravenous administration may contain various carriers such as vegetable oils, dimethylactamide, dimethyformamide, ethyl lactate, ethyl carbonate, isopropyl myristate, ethanol, and polyols (glycerol, propylene glycol, liquid polyethylene glycol, and the like). For intravenous injection, water soluble antibodies can be administered by the drip method, whereby a pharmaceutical formulation containing the antibody and a physiologically acceptable excipients is infused. Physiologically acceptable excipients may include, for example, 5% dextrose, 0.9% saline, Ringer's solution or other suitable excipients. Intramuscular preparations, e.g., a sterile formulation of a suitable soluble salt form of the antibody, can be dissolved and administered in a pharmaceutical excipient such as Water-for-Injection, 0.9% saline, or 5% glucose solution.

[0420] In some embodiments, a pharmaceutical composition that comprises a complex comprising a muscle-targeting agent covalently linked to a molecular payload is administered via site-specific or local delivery techniques. Examples of these techniques include implantable depot sources of the complex, local delivery catheters, site specific carriers, direct injection, or direct application.

[0421] In some embodiments, a pharmaceutical composition that comprises a complex comprising a muscle-targeting agent covalently linked to a molecular payload is administered at an effective concentration that confers therapeutic effect on a subject. Effective amounts vary, as recognized by those skilled in the art, depending on the severity of the disease, unique characteristics of the subject being treated, e.g., age, physical conditions, health, or weight, the duration of the treatment, the nature of any concurrent therapies, the route of administration and related factors. These related factors are known to those in the art and may be addressed with no more than routine experimentation. In some embodiments, an effective concentration is the maximum dose that is considered to be safe for the patient. In some embodiments, an effective concentration will be the lowest possible concentration that provides maximum efficacy.

[0422] Empirical considerations, e.g., the half-life of the complex in a subject, generally will contribute to determination of the concentration of pharmaceutical composition that is used for treatment. The frequency of administration may be empirically determined and adjusted to maximize the efficacy of the treatment.

[0423] The efficacy of treatment may be assessed using any suitable methods. In some embodiments, the efficacy of treatment may be assessed by evaluation of observation of symptoms associated with a dystrophinopathy, e.g., muscle atrophy or muscle weakness, through measures of a subject's self-reported outcomes, e.g., mobility, self-care, usual activities, pain/discomfort, and anxiety/depression, or by quality-of-life indicators, e.g., lifespan.

[0424] In some embodiments, a pharmaceutical composition that comprises a complex comprising a muscle-targeting agent covalently linked to a molecular payload described herein is administered to a subject at an effective concentration sufficient to modulate activity or expression of a target gene by at least 10%, at least 20%, at least 30%, at least 40%, at least 50%, at least 60%, at least 70%, at least 80%, at least 90% or at least 95% relative to a control, e.g. baseline level of gene expression prior to treatment.

### ADDITIONAL EMBODIMENTS

1. A complex comprising an anti-transferrin receptor 1 (TfR1) antibody covalently linked to a molecular payload configured for inducing skipping of exon 55 in a DMD pre-mRNA, wherein the anti-TfR1 antibody is an antibody identified in any one of Tables 2-7.
2. The complex of embodiment 1, wherein the anti-TfR1 antibody comprises:
[0425] (i) a heavy chain complementarity determining region 1 (CDR-H1) of SEQ ID NO: 33, a heavy chain complementarity determining region 2 (CDR-H2) of SEQ ID NO: 34, a heavy chain complementarity determining region 3 (CDR-H3) of SEQ ID NO: 35, a light chain complementarity determining region 1 (CDR-L1) of SEQ ID NO: 36, a light chain complementarity determining region 2 (CDR-L2) of SEQ ID NO: 37, and a light chain complementarity determining region 3 (CDR-L3) of SEQ ID NO: 32;
[0426] (ii) a CDR-H1 of SEQ ID NO: 7, a CDR-H2 of SEQ ID NO: 8, a CDR-H3 of SEQ ID NO: 9, a CDR-L1 of SEQ ID NO: 10, a CDR-L2 of SEQ ID NO: 11, and a CDR-L3 of SEQ ID NO: 6;
[0427] (iii) a CDR-H1 of SEQ ID NO: 7, a CDR-H2 of SEQ ID NO: 20, a CDR-H3 of SEQ ID NO: 9, a CDR-L1 of SEQ ID NO: 10, a CDR-L2 of SEQ ID NO: 11, and a CDR-L3 of SEQ ID NO: 6;
[0428] (iv) a CDR-H1 of SEQ ID NO: 7, a CDR-H2 of SEQ ID NO: 24, a CDR-H3 of SEQ ID NO: 9, a CDR-L1 of SEQ ID NO: 10, a CDR-L2 of SEQ ID NO: 11, and a CDR-L3 of SEQ ID NO: 6;
[0429] (v) a CDR-H1 of SEQ ID NO: 51, a CDR-H2 of SEQ ID NO: 52, a CDR-H3 of SEQ ID NO: 53, a CDR-L1 of SEQ ID NO: 54, a CDR-L2 of SEQ ID NO: 55, and a CDR-L3 of SEQ ID NO: 50;
[0430] (vi) a CDR-H1 of SEQ ID NO: 64, a CDR-H2 of SEQ ID NO: 52, a CDR-H3 of SEQ ID NO: 53, a CDR-L1 of SEQ ID NO: 54, a CDR-L2 of SEQ ID NO: 55, and a CDR-L3 of SEQ ID NO: 50; or
[0431] (vii) a CDR-H1 of SEQ ID NO: 67, a CDR-H2 of SEQ ID NO: 52, a CDR-H3 of SEQ ID NO: 53, a CDR-L1 of SEQ ID NO: 54, a CDR-L2 of SEQ ID NO: 55, and a CDR-L3 of SEQ ID NO: 50.
   3. The complex of embodiment 1 or embodiment 2, wherein the anti-TfR1 antibody comprises:
[0432] (i) a heavy chain variable region (VH) comprising an amino acid sequence at least 85% identical to SEQ ID NO: 76; and/or a light chain variable region (VL) comprising an amino acid sequence at least 85% identical to SEQ ID NO: 75;
[0433] (ii) a VH comprising an amino acid sequence at least 85% identical to SEQ ID NO: 69; and/or a VL comprising an amino acid sequence at least 85% identical to SEQ ID NO: 70;
[0434] (iii) a VH comprising an amino acid sequence at least 85% identical to SEQ ID NO: 71; and/or a VL comprising an amino acid sequence at least 85% identical to SEQ ID NO: 70;
[0435] (iv) a VH comprising an amino acid sequence at least 85% identical to SEQ ID NO: 72; and/or a VL comprising an amino acid sequence at least 85% identical to SEQ ID NO: 70;
[0436] (v) a VH comprising an amino acid sequence at least 85% identical to SEQ ID NO: 73; and/or a VL comprising an amino acid sequence at least 85% identical to SEQ ID NO: 74;
[0437] (vi) a VH comprising an amino acid sequence at least 85% identical to SEQ ID NO: 73; and/or a VL comprising an amino acid sequence at least 85% identical to SEQ ID NO: 75;
[0438] (vii) a VH comprising an amino acid sequence at least 85% identical to SEQ ID NO: 76; and/or a VL comprising an amino acid sequence at least 85% identical to SEQ ID NO: 74;
[0439] (viii) a VH comprising an amino acid sequence at least 85% identical to SEQ ID NO: 77; and/or a VL comprising an amino acid sequence at least 85% identical to SEQ ID NO: 78;
[0440] (ix) a VH comprising an amino acid sequence at least 85% identical to SEQ ID NO: 79; and/or a VL comprising an amino acid sequence at least 85% identical to SEQ ID NO: 80; or
[0441] (x) a VH comprising an amino acid sequence at least 85% identical to SEQ ID NO: 77; and/or a VL comprising an amino acid sequence at least 85% identical to SEQ ID NO: 80.
   4. The complex of any one of embodiments 1 to 3, wherein the anti-TfR1 antibody comprises:
[0442] (i) a VH comprising the amino acid sequence of SEQ ID NO: 76 and a VL comprising the amino acid sequence of SEQ ID NO: 75;
[0443] (ii) a VH comprising the amino acid sequence of SEQ ID NO: 69 and a VL comprising the amino acid sequence of SEQ ID NO: 70;
[0444] (iii) a VH comprising the amino acid sequence of SEQ ID NO: 71 and a VL comprising the amino acid sequence of SEQ ID NO: 70;
[0445] (iv) a VH comprising the amino acid sequence of SEQ ID NO: 72 and a VL comprising the amino acid sequence of SEQ ID NO: 70;
[0446] (v) a VH comprising the amino acid sequence of SEQ ID NO: 73 and a VL comprising the amino acid sequence of SEQ ID NO: 74;
[0447] (vi) a VH comprising the amino acid sequence of SEQ ID NO: 73 and a VL comprising the amino acid sequence of SEQ ID NO: 75;
[0448] (vii) a VH comprising the amino acid sequence of SEQ ID NO: 76 and a VL comprising the amino acid sequence of SEQ ID NO: 74;
[0449] (viii) a VH comprising the amino acid sequence of SEQ ID NO: 77 and a VL comprising the amino acid sequence of SEQ ID NO: 78;
[0450] (ix) a VH comprising the amino acid sequence of SEQ ID NO: 79 and a VL comprising the amino acid sequence of SEQ ID NO: 80; or
[0451] (x) a VH comprising the amino acid sequence of SEQ ID NO: 77 and a VL comprising the amino acid sequence of SEQ ID NO: 80.
   5. The complex of any one of embodiments 1 to 4, wherein the anti-TfR1 antibody is a Fab fragment, a Fab′ fragment, a F(ab′)2 fragment, an scFv, an Fv, or a full-length IgG.
   6. The complex of embodiment 5, wherein the anti-TfR1 antibody is a Fab fragment.
   7. The complex of embodiment 6, wherein the anti-TfR1 antibody comprises:
[0452] (i) a heavy chain comprising an amino acid sequence at least 85% identical to SEQ ID NO: 101; and/or a light chain comprising an amino acid sequence at least 85% identical to SEQ ID NO: 90;
[0453] (ii) a heavy chain comprising an amino acid sequence at least 85% identical to SEQ ID NO: 97; and/or a light chain comprising an amino acid sequence at least 85% identical to SEQ ID NO: 85;
[0454] (iii) a heavy chain comprising an amino acid sequence at least 85% identical to SEQ ID NO: 98; and/or a light chain comprising an amino acid sequence at least 85% identical to SEQ ID NO: 85;
[0455] (iv) a heavy chain comprising an amino acid sequence at least 85% identical to SEQ ID NO: 99; and/or a light chain comprising an amino acid sequence at least 85% identical to SEQ ID NO: 85;
[0456] (v) a heavy chain comprising an amino acid sequence at least 85% identical to SEQ ID NO: 100; and/or a light chain comprising an amino acid sequence at least 85% identical to SEQ ID NO: 89;
[0457] (vi) a heavy chain comprising an amino acid sequence at least 85% identical to SEQ ID NO: 100; and/or a light chain comprising an amino acid sequence at least 85% identical to SEQ ID NO: 90;
[0458] (vii) a heavy chain comprising an amino acid sequence at least 85% identical to SEQ ID NO: 101; and/or a light chain comprising an amino acid sequence at least 85% identical to SEQ ID NO: 89;
[0459] (viii) a heavy chain comprising an amino acid sequence at least 85% identical to SEQ ID NO: 102; and/or a light chain comprising an amino acid sequence at least 85% identical to SEQ ID NO: 93;
[0460] (ix) a heavy chain comprising an amino acid sequence at least 85% identical to SEQ ID NO: 103; and/or a light chain comprising an amino acid sequence at least 85% identical to SEQ ID NO: 95; or
[0461] (x) a heavy chain comprising an amino acid sequence at least 85% identical to SEQ ID NO: 102; and/or a light chain comprising an amino acid sequence at least 85% identical to SEQ ID NO: 95.
   8. The complex of embodiment 6 or embodiment 7, wherein the anti-TfR1 antibody comprises:
[0462] (i) a heavy chain comprising the amino acid sequence of SEQ ID NO: 101; and a light chain comprising the amino acid sequence of SEQ ID NO: 90;
[0463] (ii) a heavy chain comprising the amino acid sequence of SEQ ID NO: 97; and a light chain comprising the amino acid sequence of SEQ ID NO: 85;
[0464] (iii) a heavy chain comprising the amino acid sequence of SEQ ID NO: 98; and a light chain comprising the amino acid sequence of SEQ ID NO: 85;
[0465] (iv) a heavy chain comprising the amino acid sequence of SEQ ID NO: 99; and a light chain comprising the amino acid sequence of SEQ ID NO: 85;
[0466] (v) a heavy chain comprising the amino acid sequence of SEQ ID NO: 100; and a light chain comprising the amino acid sequence of SEQ ID NO: 89;
[0467] (vi) a heavy chain comprising the amino acid sequence of SEQ ID NO: 100; and a light chain comprising the amino acid sequence of SEQ ID NO: 90;
[0468] (vii) a heavy chain comprising the amino acid sequence of SEQ ID NO: 101; and a light chain comprising the amino acid sequence of SEQ ID NO: 89;
[0469] (viii) a heavy chain comprising the amino acid sequence of SEQ ID NO: 102; and a light chain comprising the amino acid sequence of SEQ ID NO: 93;
[0470] (ix) a heavy chain comprising the amino acid sequence of SEQ ID NO: 103; and a light chain comprising the amino acid sequence of SEQ ID NO: 95; or
[0471] (x) a heavy chain comprising the amino acid sequence of SEQ ID NO: 102; and a light chain comprising the amino acid sequence of SEQ ID NO: 95.
   9. The complex of any one of embodiments 1 to 8, wherein the anti-TfR1 antibody does not specifically bind to the transferrin binding site of the transferrin receptor 1 and/or wherein the anti-TfR1 antibody does not inhibit binding of transferrin to the transferrin receptor 1.
   10. The complex of any one of embodiments 1 to 9, wherein the molecular payload comprises an oligonucleotide.
   11. The complex of embodiment 10, wherein the oligonucleotide promotes antisense-mediated exon skipping in the DMD pre-RNA.
   12. The complex of embodiment 10 or 11, wherein the oligonucleotide comprises a region of complementarity to a splicing feature of the DMD pre-mRNA.
   13. The complex of embodiment 12, wherein the splicing feature is an exonic splicing enhancer (ESE) of the DMD pre-mRNA.
   14. The complex of embodiment 13, wherein the splicing feature is in exon 55 of the DMD pre-mRNA, optionally wherein the ESE comprises a sequence of any one of SEQ ID NOs: 2031-2061.
   15. The complex of embodiment 12, wherein the splicing feature is a branch point, a splice donor site, or a splice acceptor site.
   16. The complex of embodiment 15, wherein the splicing feature is across the junction of exon 54 and intron 54, in intron 54, across the junction of intron 54 and exon 55, across the junction of exon 55 and intron 55, in intron 55, or across the junction of intron 55 and exon 56 of the DMD pre-mRNA, optionally wherein the splicing feature comprises a sequence of any one of SEQ ID NOs: 2028-2030, 2062, and 2063.
   17. The complex of any one of embodiments 12 to 16, wherein the region of complementarity comprises at least 4 consecutive nucleosides complementary to the splicing feature.
   18. The complex of any one of embodiments 1 to 9, wherein the molecular payload comprises an oligonucleotide comprising a sequence complementary to any one of SEQ ID NOs: 160-779 or comprising a sequence of any one of SEQ ID NOs: 780-2019, wherein each thymine base (T) may independently and optionally be replaced with a uracil base (U), and each U may independently and optionally be replaced with a T.
   19. The complex of any one of embodiments 10 to 18, wherein the oligonucleotide comprises at least one modified internucleoside linkage.
   20. The complex of embodiment 19, wherein the at least one modified internucleoside linkage is a phosphorothioate linkage.
   21. The complex of any one of embodiments 10 to 20, wherein the oligonucleotide comprises one or more modified nucleosides.
   22. The complex of embodiment 21, wherein the one or more modified nucleosides are 2′-modified nucleosides.
   23. The complex of any one of embodiments 10 to 18, wherein the oligonucleotide comprises one or more phosphorodiamidate morpholinos, optionally wherein the oligonucleotide is a phosphorodiamidate morpholino oligomer (PMO).
   24. The complex of any one of embodiments 1 to 23, wherein the anti-TfR1 antibody is covalently linked to the molecular payload via a cleavable linker.
   25. The complex of embodiment 24, wherein the cleavable linker comprises a valine-citrulline sequence.
   26. The complex of any one of embodiments 1 to 25, wherein the anti-TfR1 antibody is covalently linked to the molecular payload via conjugation to a lysine residue or a cysteine residue of the antibody.
   27. A complex comprising an anti-TfR1 antibody covalently linked to an oligonucleotide configured for inducing skipping of exon 55 in a DMD pre-mRNA, wherein the oligonucleotide comprises a region of complementarity to any one of SEQ ID NOs: 160-779.
   28. The complex of embodiment 27, wherein the anti-TfR1 antibody is an antibody identified in any one of Tables 2-7.
   29. A complex comprising an anti-TfR1 antibody covalently linked to an oligonucleotide configured for inducing skipping of exon 55 in a DMD pre-mRNA, wherein the oligonucleotide comprises a region of complementarity to a splicing feature of the DMD pre-mRNA.
   30. An oligonucleotide that targets DMD, wherein the oligonucleotide comprises a region of complementarity to any one of SEQ ID NOs: 160-779.
   31. The oligonucleotide of embodiment 30, wherein the region of complementarity comprises at least 15 consecutive nucleosides complementary to any one of SEQ ID NOs: 160-779.
   32. The oligonucleotide of embodiment 30 or 31, wherein the oligonucleotide comprises at least 15 consecutive nucleosides of any one of SEQ ID NOs: 780-2019, optionally wherein the oligonucleotide comprises a sequence of any one of SEQ ID NOs: 780-2019, wherein each thymine base (T) may independently and optionally be replaced with a uracil base (U), and each U may independently and optionally be replaced with a T.
   33. A method of delivering a molecular payload to a cell, the method comprising contacting the cell with the complex of any one of embodiments 1 to 26.
   34. A method of delivering an oligonucleotide to a cell, the method comprising contacting the cell with the complex of any one of embodiments 27 to 29.
   35. A method of promoting the expression or activity of a dystrophin protein in a cell, the method comprising contacting the cell with the complex of any one of embodiments 1 to 26 in an amount effective for promoting internalization of the molecular payload to the cell, optionally wherein the cell is a muscle cell.
   36. A method of promoting the expression or activity of a dystrophin protein in a cell, the method comprising contacting the cell with the complex of any one of embodiments 27 to 29 in an amount effective for promoting internalization of the oligonucleotide to the cell, optionally wherein the cell is a muscle cell.
   37. The method of embodiment 35 or 36, wherein the cell is in vitro.
   38. The method of embodiment 35 or 36, wherein the cell is in a subject.
   39. The method of embodiment 38, wherein the subject is a human.
   40. The method of embodiment 39, wherein the subject has a DMD gene that is amenable to skipping of exon 55.
   41. The method of any one of embodiments 35 to 40, wherein the dystrophin protein is a truncated dystrophin protein.
   42. A method of treating a subject having a mutated DMD allele that is associated with a dystrophinopathy, the method comprising administering to the subject an effective amount of the complex of any one of embodiments 1 to 29.
   43. A method of promoting skipping of exon 55 of a DMD pre-mRNA transcript in a cell, the method comprising contacting the cell with an effective amount of the complex of any one of embodiments 1 to 29.
   44. A method of treating a subject having a mutated DMD allele that is associated with a dystrophinopathy, the method comprising administering to the subject an effective amount of the complex of any one of embodiments 1 to 29.

### EXAMPLES

### Example 1. Exon-Skipping Activity of Anti-TfR1 Antibody Conjugates in Duchenne Muscular Dystrophy Patient Myotubes

[0472] In this study, the exon-skipping activities of anti-TfR1 antibody conjugates comprising an anti-TfR1 Fab (3M12 VH4/Vκ3) covalently linked to a DMD exon 51-skipping antisense oligonucleotide (ASO) were evaluated. The DMD exon 51-skipping ASO is a phosphorodiamidate morpholino oligomer (PMO) of 30 nucleotides in length and targets an ESE in DMD exon 51 having the sequence TGGAGGT (SEQ ID NO: 131). Immortalized human myoblasts bearing an exon 52 deletion in the DMD gene were thawed and seeded at a density of 1e6 cell/flask in Promocell Skeletal Cell Growth Media (with 5% FBS and 1× Pen-Strep) and allowed to grow to confluency. Once confluent, cells were trypsinized and pelleted via centrifugation and resuspended in fresh Promocell Skeletal Cell Growth Media. The cell number was counted and cells were seeded into Matrigel-coated 96-well plates at a density of 50,000 cells/well. Cells were allowed to recover for 24 hours. Cells were induced to differentiate into myotubes by aspirating the growth media and replacing with differentiation media with no serum. Cells were then treated with the DMD exon 51-skipping oligonucleotide (not covalently linked to an antibody—“naked”) at 10 pM ASO or the anti-TfR1 Fab (3M12 VH4/Vκ3) covalently linked to the DMD exon 51-skipping oligonucleotide at 10 μM ASO equivalent. Cells were incubated with test articles for ten days then total RNA was harvested from the 96 well plates. cDNA synthesis was performed on 75 ng of total RNA, and mutation specific PCRs were performed to evaluate the degree of exon 51 skipping in the cells. Mutation-specific PCR products were run on a 4% agarose gel and visualized using SYBR gold. Densitometry was used to calculate the relative amounts of the skipped and unskipped amplicon and exon skipping was determined as a ratio of the Exon 51 skipped amplicon divided by the total amount of amplicon present:

$$\% Exon Skipping = \frac{Skipped Amplicon}{( Skipped Amplicon + Unskipped Amplicon )} * 100.$$

[0473] The results demonstrate that the conjugate resulted in enhanced exon skipping compared to the naked DMD exon 51-skipping oligonucleotide in patient myotubes (FIG. 1). This indicates that anti-TfR1 Fab 3M12 VH4/Vκ3 enabled cellular internalization of the conjugate into muscle cells resulting in activity of the exon 51-skipping oligonucleotide in the muscle cells. Similarly, an anti-TfR1 antibody (e.g., anti-TfR1 Fab 3M12 VH4/Vκ3) can enable internalization of a conjugate comprising the anti-TfR1 antibody covalently linked to other exon skipping oligonucleotides (e.g., an exon skipping oligonucleotide provided herein, such as an exon 55 skipping oligonucleotide) into muscle cells and facilitate activity of the exon skipping oligonucleotide in the muscle cells.

### Example 2. Exon Skipping Activity of Anti-TfR1 Fab-ASO Conjugate In Vivo in Cynomolgus Monkeys

[0474] Anti-TfR1 Fab 3M12 VH4/Vκ3 was covalently linked to the DMD exon 51-skipping antisense oligonucleotide (ASO) that was used in Example 1. The exon skipping activity of the conjugate was tested in vivo in healthy non-human primates. Naïve male cynomolgus monkeys (n=4-5 per group) were administered two doses of vehicle, 30 mg/kg naked ASO (i.e., not covalently linked to an antibody), or 122 mg/kg anti-TfR1 Fab (3M12 VH4/Vκ3) covalently linked to the DMD exon 51-skipping oligonucleotide (30 mg/kg ASO equivalent) via intravenous infusion on days 1 and 8. Animals were sacrificed and tissues harvested either 2 weeks or 4 weeks after the first dose was administered. Total RNA was collected from tissue samples using a Promega Maxwell® RSC instrument and cDNA synthesis was performed using qScript cDNA SuperMix. Assessment of exon 51 skipping was performed using end-point PCR.

[0475] Capillary electrophoresis of the PCR products was used to assess exon skipping, and % exon 51 skipping was calculated using the following formula:

$$\% Exon Skipping = \frac{Molarity of Skipped Band}{Molarity of Skipped Band + Molarity of Unskipped Band} \times 100.$$

Calculated exon 51 skipping results are shown in Table 10.

TABLE 10
Exon 51 skipping of DMD mRNA in cynomolgus monkey

| | Time | | | | |
|---|---|---|---|---|---|
| | 2 weeks | | | 4 weeks | |
| | | Naked | | Naked | |
| Group | Vehicle | ASO^{a} | Conjugate | ASO^{a} | Conjugate |
| Conjugate dose^{b} | 0 | n/a | 122 | n/a | 122 |
| ASO Dose^{c} | 0 | 30 | 30 | 30 | 30 |
| Quadriceps ^{d} | 0.00 | 1.216 | 4.906 | 0.840 | 1.708 |
| | (0.00) | (1.083) | (3.131) | (1.169) | (1.395) |
| Diaphragm ^{d} | 0.00 | 1.891 | 7.315 | 0.717 | 9.225 |
| | (0.00) | (2.911) | (1.532) | (1.315) | (4.696) |
| Heart ^{d} | 0.00 | 0.043 | 3.42 | 0.00 | 4.525 |
| | (0.00) | (0.096) | (1.192) | (0.00) | (1.400) |
| Biceps ^{d} | 0.00 | 0.607 | 3.129 | 1.214 | 4.863 |
| | (0.00) | (0.615) | (0.912) | (1.441) | (3.881) |
| Tibialis | 0.00 | 0.699 | 1.042 | 0.384 | 0.816 |
| anterior ^{d} | (0.00) | (0.997) | (0.685) | (0.615) | (0.915) |
| Gastrocnemius ^{d} | 0.00 | 0.388 | 2.424 | 0.00 | 5.393 |
| | (0.00) | (0.573) | (2.329) | (0.00) | (2.695) |

^{a}ASO = antisense oligonucleotide.
^{b}Conjugate doses are listed as mg/kg of anti-TfR1 Fab 3M12 VH4/Vκ3-ASO conjugate.
^{c}ASO doses are listed as mg/kg ASO or ASO equivalent of the anti-TfR1 Fab 3M12 VH4/Vκ3-ASO dose.
^{d} Exon skipping values are mean % exon 51 skipping with standard deviations (n = 5) in parentheses.

[0476] Tissue ASO accumulation was also quantified using a hybridization ELISA with a probe complementary to the ASO sequence. A standard curve was generated and ASO levels (in ng/g) were derived from a linear regression of the standard curve. The ASO was distributed to all tissues evaluated at a higher level following the administration of the anti-TfR1 Fab VH4/Vκ3-ASO conjugate as compared to the administration of naked ASO. Intravenous administration of naked ASO resulted in levels of ASO that were close to background levels in all tissues evaluated at 2 and 4 weeks after the first does was administered. Administration of anti-TfR1 Fab VH4/Vκ3-ASO conjugate resulted in distribution of ASO through the tissues evaluated with a rank order of heart>diaphragm>bicep>quadriceps>gastrocnemius>tibialis anterior 2 weeks after first dosing. The duration of tissue concentration was also assessed. Concentrations of the ASO in quadriceps, bicep and diaphragm decreased by less than 50% over the time period evaluated (2 to 4 weeks), while levels of ASO in the heart, tibialis anterior, and gastrocnemius remained virtually unchanged (Table 11). This indicates that anti-TfR1 Fab 3M12 VH4/Vκ3 enabled cellular internalization of the conjugate into muscle cells in vivo, resulting in activity of the exon skipping oligonucleotide in the muscle cells. Similarly, an anti-TfR1 antibody (e.g., anti-TfR1 Fab 3M12 VH4/Vκ3) in vivo can enable internalization of a conjugate comprising the anti-TfR1 antibody covalently linked to other exon skipping oligonucleotides (e.g., an exon skipping oligonucleotide provided herein, such as an exon 55 skipping oligonucleotide) into muscle cells and facilitate activity of the exon skipping oligonucleotide in the muscle cells.

TABLE 11
Tissue distribution of DMD exon 51
skipping ASO in cynomolgus monkeys

| | Time | | | | |
|---|---|---|---|---|---|
| | 2 weeks | | | 4 weeks | |
| | | Naked | Conju- | Naked | Conju- |
| Group | Vehicle | ASO^{a} | gate | ASO^{a} | gate |
| Conjugate Dose^{b} | 0 | n/a | 122 | n/a | 122 |
| ASO Dose^{c} | 0 | 30 | 30 | 30 | 30 |
| Quadriceps ^{d} | 0 | 696.8 | 2436 | 197 | 682 |
| | (59.05) | (868.15) | (954.0) | (134) | (281) |
| Diaphragm ^{d} | 0± | 580.02 | 6750 | 60 | 3131 |
| | (144.3) | (360.11) | (2256) | (120) | (1618) |
| Heart ^{d} | 0 | 1449 | 27138 | 943 | 30410 |
| | (396.03) | (1337) | (6315) | (1803) | (9247) |
| Biceps ^{d} | 0 | 615.63 | 2840 | 130 | 1326 |
| | (69.58) | (335.17) | (980.31) | (80) | (623) |
| Tibialis | 0 | 564.71 | 1591 | 169 | 1087 |
| anterior ^{d} | (76.31) | (327.88) | (253.50) | (110) | (514) |
| Gastrocnemius ^{d} | 0 | 705.47 | 2096 | 170 | 1265 |
| | (41.15) | (863.75) | (474.04) | (69) | (272) |

^{a}ASO = Antisense oligonucleotide.
^{b}Conjugate doses are listed as mg/kg of anti-TfR1 Fab 3M12 VH4/Vκ3-ASO conjugate.
^{c}ASO doses are listed as mg/kg ASO or ASO equivalent of the anti-TfR1 Fab 3M12 VH4/Vκ3-ASO conjugate dose.
^{d} ASO values are mean concentrations of ASO in tissue as ng/g with standard deviations (n = 5) in parentheses.

### Example 3. Exon-Skipping Activity of Anti-TfR1 Antibody Conjugates in DMD Patient Myotubes

[0477] In this study, the exon-skipping activities of anti-TfR1 antibody conjugates comprising an anti-TfR1 Fab (3M12 VH4/Vκ3) covalently linked to a DMD exon 55-skipping antisense oligonucleotide (ASO) are evaluated. The DMD exon 55-skipping ASO is a phosphorodiamidate morpholino oligomer (PMO) and targets a DMD exon 55 splicing feature. Immortalized human myoblasts are thawed and seeded at a density of 1e6 cell/flask in Promocell Skeletal Cell Growth Media (with 5% FBS and 1× Pen-Strep) and allowed to grow to confluency. Once confluent, cells are trypsinized and pelleted via centrifugation and resuspended in fresh Promocell Skeletal Cell Growth Media. The cell number is counted and cells are seeded into Matrigel-coated 96-well plates at a density of 50,000 cells/well. Cells are allowed to recover for 24 hours. Cells are induced to differentiate into myotubes by aspirating the growth media and replacing with differentiation media with no serum. Cells are then treated with the DMD exon 55-skipping oligonucleotide (not covalently linked to an antibody—“naked”) at 10 pM ASO or the anti-TfR1 Fab (3M12 VH4/Vκ3) covalently linked to the DMD exon 55-skipping oligonucleotide at 10 pM ASO equivalent. Cells are incubated with test articles for ten days then total RNA is harvested from the 96 well plates. cDNA synthesis is performed on 75 ng of total RNA, and mutation specific PCRs are performed to evaluate the degree of exon 55 skipping in the cells. PCR products are measured using capillary electrophoresis with UV detection. Molarity is calculated and relative amounts of the skipped and unskipped amplicon are determined. Exon skipping is determined as a ratio of the Exon 55 skipped amplicon divided by the total amount of amplicon present, according to the following formula:

$$\% Exon Skipping = \frac{Skipped Amplicon}{( Skipped Amplicon + Unskipped Amplicon )} * 100$$

[0478] The results demonstrate that the conjugates facilitate enhanced exon skipping compared to the naked DMD exon 55-skipping oligonucleotide in patient myotubes. This indicates that anti-TfR1 Fab 3M12 VH4/Vκ3 enables cellular internalization of the conjugate into muscle cells resulting in activity of the exon 55-skipping oligonucleotide in the muscle cells.

### EQUIVALENTS AND TERMINOLOGY

[0479] The disclosure illustratively described herein suitably can be practiced in the absence of any element or elements, limitation or limitations that are not specifically disclosed herein. Thus, for example, in each instance herein any of the terms “comprising”, “consisting essentially of”, and “consisting of” may be replaced with either of the other two terms. The terms and expressions which have been employed are used as terms of description and not of limitation, and there is no intention that in the use of such terms and expressions of excluding any equivalents of the features shown and described or portions thereof, but it is recognized that various modifications are possible within the scope of the disclosure. Thus, it should be understood that although the present disclosure has been specifically disclosed by preferred embodiments, optional features, modification and variation of the concepts herein disclosed may be resorted to by those skilled in the art, and that such modifications and variations are considered to be within the scope of this disclosure.

[0480] In addition, where features or aspects of the disclosure are described in terms of Markush groups or other grouping of alternatives, those skilled in the art will recognize that the disclosure is also thereby described in terms of any individual member or subgroup of members of the Markush group or other group.

[0481] It should be appreciated that, in some embodiments, sequences presented in the sequence listing may be referred to in describing the structure of an oligonucleotide or other nucleic acid. In such embodiments, the actual oligonucleotide or other nucleic acid may have one or more alternative nucleotides or nucleosides (e.g., an RNA counterpart of a DNA nucleoside or a DNA counterpart of an RNA nucleoside) and/or (e.g., and) one or more modified nucleotides/nucleosides and/or (e.g., and) one or more modified internucleoside linkages and/or (e.g., and) one or more other modification compared with the specified sequence while retaining essentially same or similar complementary properties as the specified sequence.

[0482] The use of the terms “a” and “an” and “the” and similar referents in the context of describing the invention (especially in the context of the following claims) are to be construed to cover both the singular and the plural, unless otherwise indicated herein or clearly contradicted by context. The terms “comprising,” “having,” “including,” and “containing” are to be construed as open-ended terms (i.e., meaning “including, but not limited to,”) unless otherwise noted. Recitation of ranges of values herein are merely intended to serve as a shorthand method of referring individually to each separate value falling within the range, unless otherwise indicated herein, and each separate value is incorporated into the specification as if it were individually recited herein. All methods described herein can be performed in any suitable order unless otherwise indicated herein or otherwise clearly contradicted by context. The use of any and all examples, or exemplary language (e.g., “such as”) provided herein, is intended merely to better illuminate the invention and does not pose a limitation on the scope of the invention unless otherwise claimed. No language in the specification should be construed as indicating any non-claimed element as essential to the practice of the invention.

[0483] Embodiments of this invention are described herein. Variations of those embodiments may become apparent to those of ordinary skill in the art upon reading the foregoing description.

[0484] The inventors expect skilled artisans to employ such variations as appropriate, and the inventors intend for the invention to be practiced otherwise than as specifically described herein. Accordingly, this invention includes all modifications and equivalents of the subject matter recited in the claims appended hereto as permitted by applicable law. Moreover, any combination of the above-described elements in all possible variations thereof is encompassed by the invention unless otherwise indicated herein or otherwise clearly contradicted by context. Those skilled in the art will recognize, or be able to ascertain using no more than routine experimentation, many equivalents to the specific embodiments of the invention described herein. Such equivalents are intended to be encompassed by the following claims.

1. A complex comprising an anti-transferrin receptor 1 (TfR1) antibody covalently linked to an oligonucleotide configured for inducing skipping of exon 55 in a DMD pre-mRNA, wherein the oligonucleotide comprises a region of complementarity that is complementary with at least 8 consecutive nucleotides of any one of SEQ ID NOs: 160-779.

2.-4. (canceled)

5. The complex of claim 1, wherein the anti-TfR1 antibody is a Fab fragment, a Fab′ fragment, a F(ab′)2 fragment, an scFv, an Fv, or a full-length IgG.

6. The complex of claim 5, wherein the anti-TfR1 antibody is a Fab fragment.

7.-8. (canceled)

9. The complex of claim 1, wherein the anti-TfR1 antibody does not specifically bind to the transferrin binding site of the transferrin receptor 1 and/or wherein the anti-TfR1 antibody does not inhibit binding of transferrin to the transferrin receptor 1.

10. The complex of claim 1, wherein the oligonucleotide comprises a region of complementarity to at least 4 consecutive nucleotides of a splicing feature of the DMD pre-mRNA.

11. The complex of claim 10, wherein the splicing feature is an exonic splicing enhancer (ESE) in exon 55 of the DMD pre-mRNA, optionally wherein the ESE comprises a sequence of any one of SEQ ID NOs: 2031-2061.

12. The complex of claim 10, wherein the splicing feature is a branch point, a splice donor site, or a splice acceptor site, optionally wherein the splicing feature is across the junction of exon 54 and intron 54, in intron 54, across the junction of intron 54 and exon 55, across the junction of exon 55 and intron 55, in intron 55, or across the junction of intron 55 and exon 56 of the DMD pre-mRNA, and further optionally wherein the splicing feature comprises a sequence of any one of SEQ ID NOs: 2028-2030, 2062, and 2063.

13. The complex of claim 1, wherein the oligonucleotide comprises a sequence complementary to any one of SEQ ID NOs: 160-779 or comprises a sequence of any one of SEQ ID NOs: 780-2019, wherein each thymine base (T) may independently and optionally be replaced with a uracil base (U), and each U may independently and optionally be replaced with a T.

14. The complex of claim 1, wherein the oligonucleotide comprises a sequence of any one of SEQ ID NOs: 1400, 1402-1406, 1408, 1409, 1413, 1418-1420, 1483-1491, 1493, 1495, 1496, 1502-1506, 1508, 1510-1512, 1514, 1522-1524, 1529-1531, 1534, 1535, 1559, 1583, 1587, 1591, 1596, 1597, 1598, 1604, 1606, 1607, 1638, 1641, 1693-1695, 1702, 1703, 1766, 1813, 1988, and 1995, wherein each thymine base (T) may independently and optionally be replaced with a uracil base (U), and each U may independently and optionally be replaced with a T.

15. The complex of claim 1, wherein the oligonucleotide comprises one or more phosphorodiamidate morpholinos, optionally wherein the oligonucleotide is a phosphorodiamidate morpholino oligomer (PMO).

16. The complex of claim 1, wherein the anti-TfR1 antibody is covalently linked to the oligonucleotide via a cleavable linker, optionally wherein the cleavable linker comprises a valine-citrulline sequence.

17. The complex of claim 1, wherein the anti-TfR1 antibody is covalently linked to the oligonucleotide via conjugation to a lysine residue or a cysteine residue of the antibody.

18. An oligonucleotide that targets DMD, wherein the oligonucleotide comprises a region of complementarity to any one of SEQ ID NOs: 160-779, optionally wherein the region of complementarity comprises at least 15 consecutive nucleosides complementary to any one of SEQ ID NOs: 160-779.

19. The oligonucleotide of claim 18, wherein the oligonucleotide comprises at least 15 consecutive nucleosides of any one of SEQ ID NOs: 780-2019, optionally wherein the oligonucleotide comprises a sequence of any one of SEQ ID NOs: 780-2019, wherein each thymine base (T) may independently and optionally be replaced with a uracil base (U), and each U may independently and optionally be replaced with a T.

20. A method of delivering an oligonucleotide to a cell, the method comprising contacting the cell with the complex of claim 1.

21. A method of promoting the expression or activity of a dystrophin protein in a cell, the method comprising contacting the cell with the complex of claim 1 in an amount effective for promoting internalization of the oligonucleotide to the cell, optionally wherein the cell is a muscle cell.

The application's sequence listing, which the Patent Office published only in electronic form, follows.

SEQUENCE LISTING (2201 sequences)

SEQ ID NO: 1 - protein, 8 aa, synthetic construct
  REGION 1..8: note = Synthetic
GFNIKDDY

SEQ ID NO: 2 - protein, 8 aa, synthetic construct
  REGION 1..8: note = Synthetic
IDPENGDT

SEQ ID NO: 3 - protein, 10 aa, synthetic construct
  REGION 1..10: note = Synthetic
TLWLRRGLDY

SEQ ID NO: 4 - protein, 11 aa, synthetic construct
  REGION 1..11: note = Synthetic
KSLLHSNGYTY

SEQ ID NO: 5 - skipped

SEQ ID NO: 6 - protein, 9 aa, synthetic construct
  REGION 1..9: note = Synthetic
MQHLEYPFT

SEQ ID NO: 7 - protein, 5 aa, synthetic construct
  REGION 1..5: note = Synthetic
DDYMY

SEQ ID NO: 8 - protein, 17 aa, synthetic construct
  REGION 1..17: note = Synthetic
WIDPENGDTEYASKFQD

SEQ ID NO: 9 - protein, 8 aa, synthetic construct
  REGION 1..8: note = Synthetic
WLRRGLDY

SEQ ID NO: 10 - protein, 16 aa, synthetic construct
  REGION 1..16: note = Synthetic
RSSKSLLHSNGYTYLF

SEQ ID NO: 11 - protein, 7 aa, synthetic construct
  REGION 1..7: note = Synthetic
RMSNLAS

SEQ ID NO: 12 - protein, 7 aa, synthetic construct
  REGION 1..7: note = Synthetic
GFNIKDD

SEQ ID NO: 13 - skipped

SEQ ID NO: 14 - protein, 6 aa, synthetic construct
  REGION 1..6: note = Synthetic
LRRGLD

SEQ ID NO: 15 - protein, 12 aa, synthetic construct
  REGION 1..12: note = Synthetic
SKSLLHSNGYTY

SEQ ID NO: 16 - protein, 6 aa, synthetic construct
  REGION 1..6: note = Synthetic
HLEYPF

SEQ ID NO: 17 - protein, 117 aa, synthetic construct
  REGION 1..117: note = Synthetic
EVQLQQSGAELVRPGASVKLSCTASGFNIKDDYMYWVKQRPEQGLEWIGWIDPENGDTEYASKFQDKATVTADTSSNTAYLQLSSLTSEDTAVYYCTLWLRRGLDYWGQGTSVTVSS

SEQ ID NO: 18 - protein, 112 aa, synthetic construct
  REGION 1..112: note = Synthetic
DIVMTQAAPSVPVTPGESVSISCRSSKSLLHSNGYTYLFWFLQRPGQSPQLLIYRMSNLASGVPDRFSGSGSGTAFTLRISRVEAEDVGVYYCMQHLEYPFTFGGGTKLEIK

SEQ ID NO: 19 - protein, 8 aa, synthetic construct
  REGION 1..8: note = Synthetic
IDPETGDT

SEQ ID NO: 20 - protein, 17 aa, synthetic construct
  REGION 1..17: note = Synthetic
WIDPETGDTEYASKFQD

SEQ ID NO: 21 - skipped

SEQ ID NO: 22 - protein, 117 aa, synthetic construct
  REGION 1..117: note = Synthetic
EVQLQQSGAELVRPGASVKLSCTASGFNIKDDYMYWVKQRPEQGLEWIGWIDPETGDTEYASKFQDKATVTADTSSNTAYLQLSSLTSEDTAVYYCTLWLRRGLDYWGQGTSVTVSS

SEQ ID NO: 23 - protein, 8 aa, synthetic construct
  REGION 1..8: note = Synthetic
IDPESGDT

SEQ ID NO: 24 - protein, 17 aa, synthetic construct
  REGION 1..17: note = Synthetic
WIDPESGDTEYASKFQD

SEQ ID NO: 25 - skipped

SEQ ID NO: 26 - protein, 117 aa, synthetic construct
  REGION 1..117: note = Synthetic
EVQLQQSGAELVRPGASVKLSCTASGFNIKDDYMYWVKQRPEQGLEWIGWIDPESGDTEYASKFQDKATVTADTSSNTAYLQLSSLTSEDTAVYYCTLWLRRGLDYWGQGTSVTVSS

SEQ ID NO: 27 - protein, 9 aa, synthetic construct
  REGION 1..9: note = Synthetic
GYSITSGYY

SEQ ID NO: 28 - protein, 7 aa, synthetic construct
  REGION 1..7: note = Synthetic
ITFDGAN

SEQ ID NO: 29 - protein, 12 aa, synthetic construct
  REGION 1..12: note = Synthetic
TRSSYDYDVLDY

SEQ ID NO: 30 - protein, 6 aa, synthetic construct
  REGION 1..6: note = Synthetic
QDISNF

SEQ ID NO: 31 - skipped

SEQ ID NO: 32 - protein, 9 aa, synthetic construct
  REGION 1..9: note = Synthetic
QQGHTLPYT

SEQ ID NO: 33 - protein, 6 aa, synthetic construct
  REGION 1..6: note = Synthetic
SGYYWN

SEQ ID NO: 34 - protein, 16 aa, synthetic construct
  REGION 1..16: note = Synthetic
YITFDGANNYNPSLKN

SEQ ID NO: 35 - protein, 10 aa, synthetic construct
  REGION 1..10: note = Synthetic
SSYDYDVLDY

SEQ ID NO: 36 - protein, 11 aa, synthetic construct
  REGION 1..11: note = Synthetic
RASQDISNFLN

SEQ ID NO: 37 - protein, 7 aa, synthetic construct
  REGION 1..7: note = Synthetic
YTSRLHS

SEQ ID NO: 38 - protein, 8 aa, synthetic construct
  REGION 1..8: note = Synthetic
GYSITSGY

SEQ ID NO: 39 - skipped

SEQ ID NO: 40 - protein, 8 aa, synthetic construct
  REGION 1..8: note = Synthetic
SYDYDVLD

SEQ ID NO: 41 - protein, 7 aa, synthetic construct
  REGION 1..7: note = Synthetic
SQDISNF

SEQ ID NO: 42 - protein, 6 aa, synthetic construct
  REGION 1..6: note = Synthetic
GHTLPY

SEQ ID NO: 43 - protein, 119 aa, synthetic construct
  REGION 1..119: note = Synthetic
DVQLQESGPGLVKPSQSLSLTCSVTGYSITSGYYWNWIRQFPGNKLEWMGYITFDGANNYNPSLKNRISITRDTSKNQFFLKLTSVTTEDTATYYCTRSSYDYDVLDYWGQGTTLTVSS

SEQ ID NO: 44 - protein, 107 aa, synthetic construct
  REGION 1..107: note = Synthetic
DIQMTQTTSSLSASLGDRVTISCRASQDISNFLNWYQQRPDGTVKLLIYYTSRLHSGVPSRFSGSGSGTDFSLTVSNLEQEDIATYFCQQGHTLPYTFGGGTKLEIK

SEQ ID NO: 45 - protein, 8 aa, synthetic construct
  REGION 1..8: note = Synthetic
GYSFTDYC

SEQ ID NO: 46 - protein, 8 aa, synthetic construct
  REGION 1..8: note = Synthetic
IYPGSGNT

SEQ ID NO: 47 - protein, 13 aa, synthetic construct
  REGION 1..13: note = Synthetic
AREDYYPYHGMDY

SEQ ID NO: 48 - protein, 10 aa, synthetic construct
  REGION 1..10: note = Synthetic
ESVDGYDNSF

SEQ ID NO: 49 - skipped

SEQ ID NO: 50 - protein, 9 aa, synthetic construct
  REGION 1..9: note = Synthetic
QQSSEDPWT

SEQ ID NO: 51 - protein, 5 aa, synthetic construct
  REGION 1..5: note = Synthetic
DYCIN

SEQ ID NO: 52 - protein, 17 aa, synthetic construct
  REGION 1..17: note = Synthetic
WIYPGSGNTRYSERFKG

SEQ ID NO: 53 - protein, 11 aa, synthetic construct
  REGION 1..11: note = Synthetic
EDYYPYHGMDY

SEQ ID NO: 54 - protein, 15 aa, synthetic construct
  REGION 1..15: note = Synthetic
RASESVDGYDNSFMH

SEQ ID NO: 55 - protein, 7 aa, synthetic construct
  REGION 1..7: note = Synthetic
RASNLES

SEQ ID NO: 56 - protein, 7 aa, synthetic construct
  REGION 1..7: note = Synthetic
GYSFTDY

SEQ ID NO: 57 - skipped

SEQ ID NO: 58 - protein, 9 aa, synthetic construct
  REGION 1..9: note = Synthetic
DYYPYHGMD

SEQ ID NO: 59 - protein, 11 aa, synthetic construct
  REGION 1..11: note = Synthetic
SESVDGYDNSF

SEQ ID NO: 60 - protein, 6 aa, synthetic construct
  REGION 1..6: note = Synthetic
SSEDPW

SEQ ID NO: 61 - protein, 120 aa, synthetic construct
  REGION 1..120: note = Synthetic
QIQLQQSGPELVRPGASVKISCKASGYSFTDYCINWVNQRPGQGLEWIGWIYPGSGNTRYSERFKGKATLTVDTSSNTAYMQLSSLTSEDSAVYFCAREDYYPYHGMDYWGQGTSVTVSS

SEQ ID NO: 62 - protein, 111 aa, synthetic construct
  REGION 1..111: note = Synthetic
DIVLTQSPTSLAVSLGQRATISCRASESVDGYDNSFMHWYQQKPGQPPKLLIFRASNLESGIPARFSGSGSRTDFTLTINPVEAADVATYYCQQSSEDPWTFGGGTKLEIK

SEQ ID NO: 63 - protein, 8 aa, synthetic construct
  REGION 1..8: note = Synthetic
GYSFTDYY

SEQ ID NO: 64 - protein, 5 aa, synthetic construct
  REGION 1..5: note = Synthetic
DYYIN

SEQ ID NO: 65 - protein, 120 aa, synthetic construct
  REGION 1..120: note = Synthetic
QIQLQQSGPELVRPGASVKISCKASGYSFTDYYINWVNQRPGQGLEWIGWIYPGSGNTRYSERFKGKATLTVDTSSNTAYMQLSSLTSEDSAVYFCAREDYYPYHGMDYWGQGTSVTVSS

SEQ ID NO: 66 - protein, 8 aa, synthetic construct
  REGION 1..8: note = Synthetic
GYSFTDYD

SEQ ID NO: 67 - protein, 5 aa, synthetic construct
  REGION 1..5: note = Synthetic
DYDIN

SEQ ID NO: 68 - protein, 120 aa, synthetic construct
  REGION 1..120: note = Synthetic
QIQLQQSGPELVRPGASVKISCKASGYSFTDYDINWVNQRPGQGLEWIGWIYPGSGNTRYSERFKGKATLTVDTSSNTAYMQLSSLTSEDSAVYFCAREDYYPYHGMDYWGQGTSVTVSS

SEQ ID NO: 69 - protein, 117 aa, synthetic construct
  REGION 1..117: note = Synthetic
EVQLVQSGSELKKPGASVKVSCTASGFNIKDDYMYWVRQPPGKGLEWIGWIDPETGDTEYASKFQDRVTVTADTSTNTAYMELSSLRSEDTAVYYCTLWLRRGLDYWGQGTLVTVSS

SEQ ID NO: 70 - protein, 112 aa, synthetic construct
  REGION 1..112: note = Synthetic
DIVMTQSPLSLPVTPGEPASISCRSSKSLLHSNGYTYLFWFQQRPGQSPRLLIYRMSNLASGVPDRFSGSGSGTDFTLKISRVEAEDVGVYYCMQHLEYPFTFGGGTKVEIK

SEQ ID NO: 71 - protein, 117 aa, synthetic construct
  REGION 1..117: note = Synthetic
EVQLVQSGSELKKPGASVKVSCTASGFNIKDDYMYWVRQPPGKGLEWIGWIDPESGDTEYASKFQDRVTVTADTSTNTAYMELSSLRSEDTAVYYCTLWLRRGLDYWGQGTLVTVSS

SEQ ID NO: 72 - protein, 117 aa, synthetic construct
  REGION 1..117: note = Synthetic
EVQLVQSGSELKKPGASVKVSCTASGFNIKDDYMYWVRQPPGKGLEWIGWIDPENGDTEYASKFQDRVTVTADTSTNTAYMELSSLRSEDTAVYYCTLWLRRGLDYWGQGTLVTVSS

SEQ ID NO: 73 - protein, 119 aa, synthetic construct
  REGION 1..119: note = Synthetic
QVQLQESGPGLVKPSQTLSLTCSVTGYSITSGYYWNWIRQPPGKGLEWMGYITFDGANNYNPSLKNRVSISRDTSKNQFSLKLSSVTAEDTATYYCTRSSYDYDVLDYWGQGTTVTVSS

SEQ ID NO: 74 - protein, 107 aa, synthetic construct
  REGION 1..107: note = Synthetic
DIQMTQSPSSLSASVGDRVTITCRASQDISNFLNWYQQKPGQPVKLLIYYTSRLHSGVPSRFSGSGSGTDFTLTISSLQPEDFATYFCQQGHTLPYTFGQGTKLEIK

SEQ ID NO: 75 - protein, 107 aa, synthetic construct
  REGION 1..107: note = Synthetic
DIQMTQSPSSLSASVGDRVTITCRASQDISNFLNWYQQKPGQPVKLLIYYTSRLHSGVPSRFSGSGSGTDFTLTISSLQPEDFATYYCQQGHTLPYTFGQGTKLEIK

SEQ ID NO: 76 - protein, 119 aa, synthetic construct
  REGION 1..119: note = Synthetic
QVQLQESGPGLVKPSQTLSLTCTVTGYSITSGYYWNWIRQPPGKGLEWIGYITFDGANNYNPSLKNRVSISRDTSKNQFSLKLSSVTAEDTATYYCTRSSYDYDVLDYWGQGTTVTVSS

SEQ ID NO: 77 - protein, 120 aa, synthetic construct
  REGION 1..120: note = Synthetic
QVQLVQSGAEVKKPGASVKVSCKASGYSFTDYYINWVRQAPGQGLEWMGWIYPGSGNTRYSERFKGRVTITRDTSASTAYMELSSLRSEDTAVYYCAREDYYPYHGMDYWGQGTLVTVSS

SEQ ID NO: 78 - protein, 111 aa, synthetic construct
  REGION 1..111: note = Synthetic
DIVLTQSPDSLAVSLGERATINCRASESVDGYDNSFMHWYQQKPGQPPKLLIFRASNLESGVPDRFSGSGSRTDFTLTISSLQAEDVAVYYCQQSSEDPWTFGQGTKLEIK

SEQ ID NO: 79 - protein, 120 aa, synthetic construct
  REGION 1..120: note = Synthetic
QVQLVQSGAEVKKPGASVKVSCKASGYSFTDYDINWVRQAPGQGLEWMGWIYPGSGNTRYSERFKGRVTITRDTSASTAYMELSSLRSEDTAVYYCAREDYYPYHGMDYWGQGTLVTVSS

SEQ ID NO: 80 - protein, 111 aa, synthetic construct
  REGION 1..111: note = Synthetic
DIVMTQSPDSLAVSLGERATINCRASESVDGYDNSFMHWYQQKPGQPPKLLIFRASNLESGVPDRFSGSGSGTDFTLTISSLQAEDVAVYYCQQSSEDPWTFGQGTKLEIK

SEQ ID NO: 81 - protein, 330 aa, Homo sapiens [sequence omitted]

SEQ ID NO: 82 - protein, 330 aa, synthetic construct
  REGION 1..330: note = Synthetic
ASTKGPSVFPLAPSSKSTSGGTAALGCLVKDYFPEPVTVSWNSGALTSGVHTFPAVLQSSGLYSLSSVVTVPSSSLGTQTYICNVNHKPSNTKVDKKVEPKSCDKTHTCPPCPAPEAAGGPSVFLFPPKPKDTLMISRTPEVTCVVVDVSHEDPEVKFNWYVDGVEVHNAKTKPREEQYNSTYRVVSVLTVLHQDWLNGKEYKCKVSNKALPAPIEKTISKAKGQPREPQVYTLPPSRDELTKNQVSLTCLVKGFYPSDIAVEWESNGQPENNYKTTPPVLDSDGSFFLYSKLTVDKSRWQQGNVFSCSVMHEALHNHYTQKSLSLSPGK

SEQ ID NO: 83 - protein, 107 aa, synthetic construct [sequence omitted]

SEQ ID NO: 84 - protein, 447 aa, synthetic construct
  REGION 1..447: note = Synthetic
EVQLVQSGSELKKPGASVKVSCTASGFNIKDDYMYWVRQPPGKGLEWIGWIDPETGDTEYASKFQDRVTVTADTSTNTAYMELSSLRSEDTAVYYCTLWLRRGLDYWGQGTLVTVSSASTKGPSVFPLAPSSKSTSGGTAALGCLVKDYFPEPVTVSWNSGALTSGVHTFPAVLQSSGLYSLSSVVTVPSSSLGTQTYICNVNHKPSNTKVDKKVEPKSCDKTHTCPPCPAPELLGGPSVFLFPPKPKDTLMISRTPEVTCVVVDVSHEDPEVKFNWYVDGVEVHNAKTKPREEQYNSTYRVVSVLTVLHQDWLNGKEYKCKVSNKALPAPIEKTISKAKGQPREPQVYTLPPSRDELTKNQVSLTCLVKGFYPSDIAVEWESNGQPENNYKTTPPVLDSDGSFFLYSKLTVDKSRWQQGNVFSCSVMHEALHNHYTQKSLSLSPGK

SEQ ID NO: 85 - protein, 219 aa, synthetic construct
  REGION 1..219: note = Synthetic
DIVMTQSPLSLPVTPGEPASISCRSSKSLLHSNGYTYLFWFQQRPGQSPRLLIYRMSNLASGVPDRFSGSGSGTDFTLKISRVEAEDVGVYYCMQHLEYPFTFGGGTKVEIKRTVAAPSVFIFPPSDEQLKSGTASVVCLLNNFYPREAKVQWKVDNALQSGNSQESVTEQDSKDSTYSLSSTLTLSKADYEKHKVYACEVTHQGLSSPVTKSFNRGEC

SEQ ID NO: 86 - protein, 447 aa, synthetic construct
  REGION 1..447: note = Synthetic
EVQLVQSGSELKKPGASVKVSCTASGFNIKDDYMYWVRQPPGKGLEWIGWIDPESGDTEYASKFQDRVTVTADTSTNTAYMELSSLRSEDTAVYYCTLWLRRGLDYWGQGTLVTVSSASTKGPSVFPLAPSSKSTSGGTAALGCLVKDYFPEPVTVSWNSGALTSGVHTFPAVLQSSGLYSLSSVVTVPSSSLGTQTYICNVNHKPSNTKVDKKVEPKSCDKTHTCPPCPAPELLGGPSVFLFPPKPKDTLMISRTPEVTCVVVDVSHEDPEVKFNWYVDGVEVHNAKTKPREEQYNSTYRVVSVLTVLHQDWLNGKEYKCKVSNKALPAPIEKTISKAKGQPREPQVYTLPPSRDELTKNQVSLTCLVKGFYPSDIAVEWESNGQPENNYKTTPPVLDSDGSFFLYSKLTVDKSRWQQGNVFSCSVMHEALHNHYTQKSLSLSPGK

SEQ ID NO: 87 - protein, 447 aa, synthetic construct
  REGION 1..447: note = Synthetic
EVQLVQSGSELKKPGASVKVSCTASGFNIKDDYMYWVRQPPGKGLEWIGWIDPENGDTEYASKFQDRVTVTADTSTNTAYMELSSLRSEDTAVYYCTLWLRRGLDYWGQGTLVTVSSASTKGPSVFPLAPSSKSTSGGTAALGCLVKDYFPEPVTVSWNSGALTSGVHTFPAVLQSSGLYSLSSVVTVPSSSLGTQTYICNVNHKPSNTKVDKKVEPKSCDKTHTCPPCPAPELLGGPSVFLFPPKPKDTLMISRTPEVTCVVVDVSHEDPEVKFNWYVDGVEVHNAKTKPREEQYNSTYRVVSVLTVLHQDWLNGKEYKCKVSNKALPAPIEKTISKAKGQPREPQVYTLPPSRDELTKNQVSLTCLVKGFYPSDIAVEWESNGQPENNYKTTPPVLDSDGSFFLYSKLTVDKSRWQQGNVFSCSVMHEALHNHYTQKSLSLSPGK

SEQ ID NO: 88 - protein, 449 aa, synthetic construct
  REGION 1..449: note = Synthetic
QVQLQESGPGLVKPSQTLSLTCSVTGYSITSGYYWNWIRQPPGKGLEWMGYITFDGANNYNPSLKNRVSISRDTSKNQFSLKLSSVTAEDTATYYCTRSSYDYDVLDYWGQGTTVTVSSASTKGPSVFPLAPSSKSTSGGTAALGCLVKDYFPEPVTVSWNSGALTSGVHTFPAVLQSSGLYSLSSVVTVPSSSLGTQTYICNVNHKPSNTKVDKKVEPKSCDKTHTCPPCPAPELLGGPSVFLFPPKPKDTLMISRTPEVTCVVVDVSHEDPEVKFNWYVDGVEVHNAKTKPREEQYNSTYRVVSVLTVLHQDWLNGKEYKCKVSNKALPAPIEKTISKAKGQPREPQVYTLPPSRDELTKNQVSLTCLVKGFYPSDIAVEWESNGQPENNYKTTPPVLDSDGSFFLYSKLTVDKSRWQQGNVFSCSVMHEALHNHYTQKSLSLSPGK

SEQ ID NO: 89 - protein, 214 aa, synthetic construct
  REGION 1..214: note = Synthetic
DIQMTQSPSSLSASVGDRVTITCRASQDISNFLNWYQQKPGQPVKLLIYYTSRLHSGVPSRFSGSGSGTDFTLTISSLQPEDFATYFCQQGHTLPYTFGQGTKLEIKRTVAAPSVFIFPPSDEQLKSGTASVVCLLNNFYPREAKVQWKVDNALQSGNSQESVTEQDSKDSTYSLSSTLTLSKADYEKHKVYACEVTHQGLSSPVTKSFNRGEC

SEQ ID NO: 90 - protein, 214 aa, synthetic construct
  REGION 1..214: note = Synthetic
DIQMTQSPSSLSASVGDRVTITCRASQDISNFLNWYQQKPGQPVKLLIYYTSRLHSGVPSRFSGSGSGTDFTLTISSLQPEDFATYYCQQGHTLPYTFGQGTKLEIKRTVAAPSVFIFPPSDEQLKSGTASVVCLLNNFYPREAKVQWKVDNALQSGNSQESVTEQDSKDSTYSLSSTLTLSKADYEKHKVYACEVTHQGLSSPVTKSFNRGEC

SEQ ID NO: 91 - protein, 449 aa, synthetic construct
  REGION 1..449: note = Synthetic
QVQLQESGPGLVKPSQTLSLTCTVTGYSITSGYYWNWIRQPPGKGLEWIGYITFDGANNYNPSLKNRVSISRDTSKNQFSLKLSSVTAEDTATYYCTRSSYDYDVLDYWGQGTTVTVSSASTKGPSVFPLAPSSKSTSGGTAALGCLVKDYFPEPVTVSWNSGALTSGVHTFPAVLQSSGLYSLSSVVTVPSSSLGTQTYICNVNHKPSNTKVDKKVEPKSCDKTHTCPPCPAPELLGGPSVFLFPPKPKDTLMISRTPEVTCVVVDVSHEDPEVKFNWYVDGVEVHNAKTKPREEQYNSTYRVVSVLTVLHQDWLNGKEYKCKVSNKALPAPIEKTISKAKGQPREPQVYTLPPSRDELTKNQVSLTCLVKGFYPSDIAVEWESNGQPENNYKTTPPVLDSDGSFFLYSKLTVDKSRWQQGNVFSCSVMHEALHNHYTQKSLSLSPGK

SEQ ID NO: 92 - protein, 450 aa, synthetic construct
  REGION 1..450: note = Synthetic
QVQLVQSGAEVKKPGASVKVSCKASGYSFTDYYINWVRQAPGQGLEWMGWIYPGSGNTRYSERFKGRVTITRDTSASTAYMELSSLRSEDTAVYYCAREDYYPYHGMDYWGQGTLVTVSSASTKGPSVFPLAPSSKSTSGGTAALGCLVKDYFPEPVTVSWNSGALTSGVHTFPAVLQSSGLYSLSSVVTVPSSSLGTQTYICNVNHKPSNTKVDKKVEPKSCDKTHTCPPCPAPELLGGPSVFLFPPKPKDTLMISRTPEVTCVVVDVSHEDPEVKFNWYVDGVEVHNAKTKPREEQYNSTYRVVSVLTVLHQDWLNGKEYKCKVSNKALPAPIEKTISKAKGQPREPQVYTLPPSRDELTKNQVSLTCLVKGFYPSDIAVEWESNGQPENNYKTTPPVLDSDGSFFLYSKLTVDKSRWQQGNVFSCSVMHEALHNHYTQKSLSLSPGK

SEQ ID NO: 93 - protein, 218 aa, synthetic construct
  REGION 1..218: note = Synthetic
DIVLTQSPDSLAVSLGERATINCRASESVDGYDNSFMHWYQQKPGQPPKLLIFRASNLESGVPDRFSGSGSRTDFTLTISSLQAEDVAVYYCQQSSEDPWTFGQGTKLEIKRTVAAPSVFIFPPSDEQLKSGTASVVCLLNNFYPREAKVQWKVDNALQSGNSQESVTEQDSKDSTYSLSSTLTLSKADYEKHKVYACEVTHQGLSSPVTKSFNRGEC

SEQ ID NO: 94 - protein, 450 aa, synthetic construct
  REGION 1..450: note = Synthetic
QVQLVQSGAEVKKPGASVKVSCKASGYSFTDYDINWVRQAPGQGLEWMGWIYPGSGNTRYSERFKGRVTITRDTSASTAYMELSSLRSEDTAVYYCAREDYYPYHGMDYWGQGTLVTVSSASTKGPSVFPLAPSSKSTSGGTAALGCLVKDYFPEPVTVSWNSGALTSGVHTFPAVLQSSGLYSLSSVVTVPSSSLGTQTYICNVNHKPSNTKVDKKVEPKSCDKTHTCPPCPAPELLGGPSVFLFPPKPKDTLMISRTPEVTCVVVDVSHEDPEVKFNWYVDGVEVHNAKTKPREEQYNSTYRVVSVLTVLHQDWLNGKEYKCKVSNKALPAPIEKTISKAKGQPREPQVYTLPPSRDELTKNQVSLTCLVKGFYPSDIAVEWESNGQPENNYKTTPPVLDSDGSFFLYSKLTVDKSRWQQGNVFSCSVMHEALHNHYTQKSLSLSPGK

SEQ ID NO: 95 - protein, 218 aa, synthetic construct
  REGION 1..218: note = Synthetic
DIVMTQSPDSLAVSLGERATINCRASESVDGYDNSFMHWYQQKPGQPPKLLIFRASNLESGVPDRFSGSGSGTDFTLTISSLQAEDVAVYYCQQSSEDPWTFGQGTKLEIKRTVAAPSVFIFPPSDEQLKSGTASVVCLLNNFYPREAKVQWKVDNALQSGNSQESVTEQDSKDSTYSLSSTLTLSKADYEKHKVYACEVTHQGLSSPVTKSFNRGEC

SEQ ID NO: 96 - protein, 108 aa, synthetic construct
  REGION 1..108: note = Synthetic
ASTKGPSVFPLAPSSKSTSGGTAALGCLVKDYFPEPVTVSWNSGALTSGVHTFPAVLQSSGLYSLSSVVTVPSSSLGTQTYICNVNHKPSNTKVDKKVEPKSCDKTHT

SEQ ID NO: 97 - protein, 225 aa, synthetic construct
  REGION 1..225: note = Synthetic
EVQLVQSGSELKKPGASVKVSCTASGFNIKDDYMYWVRQPPGKGLEWIGWIDPETGDTEYASKFQDRVTVTADTSTNTAYMELSSLRSEDTAVYYCTLWLRRGLDYWGQGTLVTVSSASTKGPSVFPLAPSSKSTSGGTAALGCLVKDYFPEPVTVSWNSGALTSGVHTFPAVLQSSGLYSLSSVVTVPSSSLGTQTYICNVNHKPSNTKVDKKVEPKSCDKTHT

SEQ ID NO: 98 - protein, 225 aa, synthetic construct
  REGION 1..225: note = Synthetic
EVQLVQSGSELKKPGASVKVSCTASGFNIKDDYMYWVRQPPGKGLEWIGWIDPESGDTEYASKFQDRVTVTADTSTNTAYMELSSLRSEDTAVYYCTLWLRRGLDYWGQGTLVTVSSASTKGPSVFPLAPSSKSTSGGTAALGCLVKDYFPEPVTVSWNSGALTSGVHTFPAVLQSSGLYSLSSVVTVPSSSLGTQTYICNVNHKPSNTKVDKKVEPKSCDKTHT

SEQ ID NO: 99 - protein, 225 aa, synthetic construct
  REGION 1..225: note = Synthetic
EVQLVQSGSELKKPGASVKVSCTASGFNIKDDYMYWVRQPPGKGLEWIGWIDPENGDTEYASKFQDRVTVTADTSTNTAYMELSSLRSEDTAVYYCTLWLRRGLDYWGQGTLVTVSSASTKGPSVFPLAPSSKSTSGGTAALGCLVKDYFPEPVTVSWNSGALTSGVHTFPAVLQSSGLYSLSSVVTVPSSSLGTQTYICNVNHKPSNTKVDKKVEPKSCDKTHT

SEQ ID NO: 100 - protein, 227 aa, synthetic construct
  REGION 1..227: note = Synthetic
QVQLQESGPGLVKPSQTLSLTCSVTGYSITSGYYWNWIRQPPGKGLEWMGYITFDGANNYNPSLKNRVSISRDTSKNQFSLKLSSVTAEDTATYYCTRSSYDYDVLDYWGQGTTVTVSSASTKGPSVFPLAPSSKSTSGGTAALGCLVKDYFPEPVTVSWNSGALTSGVHTFPAVLQSSGLYSLSSVVTVPSSSLGTQTYICNVNHKPSNTKVDKKVEPKSCDKTHT

SEQ ID NO: 101 - protein, 227 aa, synthetic construct
  REGION 1..227: note = Synthetic
QVQLQESGPGLVKPSQTLSLTCTVTGYSITSGYYWNWIRQPPGKGLEWIGYITFDGANNYNPSLKNRVSISRDTSKNQFSLKLSSVTAEDTATYYCTRSSYDYDVLDYWGQGTTVTVSSASTKGPSVFPLAPSSKSTSGGTAALGCLVKDYFPEPVTVSWNSGALTSGVHTFPAVLQSSGLYSLSSVVTVPSSSLGTQTYICNVNHKPSNTKVDKKVEPKSCDKTHT

SEQ ID NO: 102 - protein, 228 aa, synthetic construct
  REGION 1..228: note = Synthetic
QVQLVQSGAEVKKPGASVKVSCKASGYSFTDYYINWVRQAPGQGLEWMGWIYPGSGNTRYSERFKGRVTITRDTSASTAYMELSSLRSEDTAVYYCAREDYYPYHGMDYWGQGTLVTVSSASTKGPSVFPLAPSSKSTSGGTAALGCLVKDYFPEPVTVSWNSGALTSGVHTFPAVLQSSGLYSLSSVVTVPSSSLGTQTYICNVNHKPSNTKVDKKVEPKSCDKTHT

SEQ ID NO: 103 - protein, 228 aa, synthetic construct
  REGION 1..228: note = Synthetic
QVQLVQSGAEVKKPGASVKVSCKASGYSFTDYDINWVRQAPGQGLEWMGWIYPGSGNTRYSERFKGRVTITRDTSASTAYMELSSLRSEDTAVYYCAREDYYPYHGMDYWGQGTLVTVSSASTKGPSVFPLAPSSKSTSGGTAALGCLVKDYFPEPVTVSWNSGALTSGVHTFPAVLQSSGLYSLSSVVTVPSSSLGTQTYICNVNHKPSNTKVDKKVEPKSCDKTHT

SEQ ID NO: 104 - protein, 19 aa, synthetic construct
  REGION 1..19: note = Synthetic
MGWSCIILFLVATATGVHS

SEQ ID NO: 105 - protein, 760 aa, Homo sapiens
MMDQARSAFSNLFGGEPLSYTRFSLARQVDGDNSHVEMKLAVDEEENADNNTKANVTKPKRCSGSICYGTIAVIVFFLIGFMIGYLGYCKGVEPKTECERLAGTESPVREEPGEDFPAARRLYWDDLKRKLSEKLDSTDFTGTIKLLNENSYVPREAGSQKDENLALYVENQFREFKLSKVWRDQHFVKIQVKDSAQNSVIIVDKNGRLVYLVENPGGYVAYSKAATVTGKLVHANFGTKKDFEDLYTPVNGSIVIVRAGKITFAEKVANAESLNAIGVLIYMDQTKFPIVNAELSFFGHAHLGTGDPYTPGFPSFNHTQFPPSRSSGLPNIPVQTISRAAAEKLFGNMEGDCPSDWKTDSTCRMVTSESKNVKLTVSNVLKEIKILNIFGVIKGFVEPDHYVVVGAQRDAWGPGAAKSGVGTALLLKLAQMFSDMVLKDGFQPSRSIIFASWSAGDFGSVGATEWLEGYLSSLHLKAFTYINLDKAVLGTSNFKVSASPLLYTLIEKTMQNVKHPVTGQFLYQDSNWASKVEKLTLDNAAFPFLAYSGIPAVSFCFCEDTDYPYLGTTMDTYKELIERIPELNKVARAAAEVAGQFVIKLTHDVELNLDYERYNSQLLSFVRDLNQYRADIKEMGLSLQWLYSARGDFFRATSRLTTDFGNAEKTDRFVMKKLNDRVMRVEYHFLSPYVSPKESPFRHVFWGSGSHTLPALLENLKLRKQNNGAFNETLFRNQLALATWTIQGAANALSGDVWDIDNEF

SEQ ID NO: 106 - protein, 760 aa, Macaca mulatta
MMDQARSAFSNLFGGEPLSYTRFSLARQVDGDNSHVEMKLGVDEEENTDNNTKPNGTKPKRCGGNICYGTIAVIIFFLIGFMIGYLGYCKGVEPKTECERLAGTESPAREEPEEDFPAAPRLYWDDLKRKLSEKLDTTDFTSTIKLLNENLYVPREAGSQKDENLALYIENQFREFKLSKVWRDQHFVKIQVKDSAQNSVIIVDKNGGLVYLVENPGGYVAYSKAATVTGKLVHANFGTKKDFEDLDSPVNGSIVIVRAGKITFAEKVANAESLNAIGVLIYMDQTKFPIVKADLSFFGHAHLGTGDPYTPGFPSFNHTQFPPSQSSGLPNIPVQTISRAAAEKLFGNMEGDCPSDWKTDSTCKMVTSENKSVKLTVSNVLKETKILNIFGVIKGFVEPDHYVVVGAQRDAWGPGAAKSSVGTALLLKLAQMFSDMVLKDGFQPSRSIIFASWSAGDFGSVGATEWLEGYLSSLHLKAFTYINLDKAVLGTSNFKVSASPLLYTLIEKTMQDVKHPVTGRSLYQDSNWASKVEKLTLDNAAFPFLAYSGIPAVSFCFCEDTDYPYLGTTMDTYKELVERIPELNKVARAAAEVAGQFVIKLTHDTELNLDYERYNSQLLLFLRDLNQYRADVKEMGLSLQWLYSARGDFFRATSRLTTDFRNAEKRDKFVMKKLNDRVMRVEYYFLSPYVSPKESPFRHVFWGSGSHTLSALLESLKLRRQNNSAFNETLFRNQLALATWTIQGAANALSGDVWDIDNEF

SEQ ID NO: 107 - protein, 760 aa, Macaca fascicularis
MMDQARSAFSNLFGGEPLSYTRFSLARQVDGDNSHVEMKLGVDEEENTDNNTKANGTKPKRCGGNICYGTIAVIIFFLIGFMIGYLGYCKGVEPKTECERLAGTESPAREEPEEDFPAAPRLYWDDLKRKLSEKLDTTDFTSTIKLLNENLYVPREAGSQKDENLALYIENQFREFKLSKVWRDQHFVKIQVKDSAQNSVIIVDKNGGLVYLVENPGGYVAYSKAATVTGKLVHANFGTKKDFEDLDSPVNGSIVIVRAGKITFAEKVANAESLNAIGVLIYMDQTKFPIVKADLSFFGHAHLGTGDPYTPGFPSFNHTQFPPSQSSGLPNIPVQTISRAAAEKLFGNMEGDCPSDWKTDSTCKMVTSENKSVKLTVSNVLKETKILNIFGVIKGFVEPDHYVVVGAQRDAWGPGAAKSSVGTALLLKLAQMFSDMVLKDGFQPSRSIIFASWSAGDFGSVGATEWLEGYLSSLHLKAFTYINLDKAVLGTSNFKVSASPLLYTLIEKTMQDVKHPVTGRSLYQDSNWASKVEKLTLDNAAFPFLAYSGIPAVSFCFCEDTDYPYLGTTMDTYKELVERIPELNKVARAAAEVAGQFVIKLTHDTELNLDYERYNSQLLLFLRDLNQYRADVKEMGLSLQWLYSARGDFFRATSRLTTDFRNAEKRDKFVMKKLNDRVMRVEYYFLSPYVSPKESPFRHVFWGSGSHTLSALLESLKLRRQNNSAFNETLFRNQLALATWTIQGAANALSGDVWDIDNEF

SEQ ID NO: 108 - protein, 763 aa, Mus musculus
MMDQARSAFSNLFGGEPLSYTRFSLARQVDGDNSHVEMKLAADEEENADNNMKASVRKPKRFNGRLCFAAIALVIFFLIGFMSGYLGYCKRVEQKEECVKLAETEETDKSETMETEDVPTSSRLYWADLKTLLSEKLNSIEFADTIKQLSQNTYTPREAGSQKDESLAYYIENQFHEFKFSKVWRDEHYVKIQVKSSIGQNMVTIVQSNGNLDPVESPEGYVAFSKPTEVSGKLVHANFGTKKDFEELSYSVNGSLVIVRAGEITFAEKVANAQSFNAIGVLIYMDKNKFPVVEADLALFGHAHLGTGDPYTPGFPSFNHTQFPPSQSSGLPNIPVQTISRAAAEKLFGKMEGSCPARWNIDSSCKLELSQNQNVKLIVKNVLKERRILNIFGVIKGYEEPDRYVVVGAQRDALGAGVAAKSSVGTGLLLKLAQVFSDMISKDGFRPSRSIIFASWTAGDFGAVGATEWLEGYLSSLHLKAFTYINLDKVVLGTSNFKVSASPLLYTLMGKIMQDVKHPVDGKSLYRDSNWISKVEKLSFDNAAYPFLAYSGIPAVSFCFCEDADYPYLGTRLDTYEALTQKVPQLNQMVRTAAEVAGQLIIKLTHDVELNLDYEMYNSKLLSFMKDLNQFKTDIRDMGLSLQWLYSARGDYFRATSRLTTDFHNAEKTNRFVMREINDRIMKVEYHFLSPYVSPRESPFRHIFWGSGSHTLSALVENLKLRQKNITAFNETLFRNQLALATWTIQGVANALSGDIWNIDNEF

SEQ ID NO: 109 - protein, 197 aa, synthetic construct
  REGION 1..197: note = Synthetic
FVKIQVKDSAQNSVIIVDKNGRLVYLVENPGGYVAYSKAATVTGKLVHANFGTKKDFEDLYTPVNGSIVIVRAGKITFAEKVANAESLNAIGVLIYMDQTKFPIVNAELSFFGHAHLGTGDPYTPGFPSFNHTQFPPSRSSGLPNIPVQTISRAAAEKLFGNMEGDCPSDWKTDSTCRMVTSESKNVKLTVSNVLKE

SEQ ID NO: 110 - protein, 5 aa, synthetic construct
  REGION 1..5: note = Synthetic
SYWMH

SEQ ID NO: 111 - protein, 17 aa, synthetic construct
  REGION 1..17: note = Synthetic
EINPTNGRTNYIEKFKS

SEQ ID NO: 112 - protein, 7 aa, synthetic construct
  REGION 1..7: note = Synthetic
GTRAYHY

SEQ ID NO: 113 - protein, 11 aa, synthetic construct
  REGION 1..11: note = Synthetic
RASDNLYSNLA

SEQ ID NO: 114 - protein, 7 aa, synthetic construct
  REGION 1..7: note = Synthetic
DATNLAD

SEQ ID NO: 115 - protein, 9 aa, synthetic construct
  REGION 1..9: note = Synthetic
QHFWGTPLT

SEQ ID NO: 116 - protein, 7 aa, synthetic construct
  REGION 1..7: note = Synthetic
GYTFTSY

SEQ ID NO: 117 - protein, 6 aa, synthetic construct
  REGION 1..6: note = Synthetic
NPTNGR

SEQ ID NO: 118 - protein, 6 aa, synthetic construct
  REGION 1..6: note = Synthetic
TSYWMH

SEQ ID NO: 119 - protein, 13 aa, synthetic construct
  REGION 1..13: note = Synthetic
WIGEINPTNGRTN

SEQ ID NO: 120 - protein, 6 aa, synthetic construct
  REGION 1..6: note = Synthetic
ARGTRA

SEQ ID NO: 121 - protein, 7 aa, synthetic construct
  REGION 1..7: note = Synthetic
YSNLAWY

SEQ ID NO: 122 - protein, 10 aa, synthetic construct
  REGION 1..10: note = Synthetic
LLVYDATNLA

SEQ ID NO: 123 - protein, 8 aa, synthetic construct
  REGION 1..8: note = Synthetic
QHFWGTPL

SEQ ID NO: 124 - protein, 116 aa, Mus musculus
QVQLQQPGAELVKPGASVKLSCKASGYTFTSYWMHWVKQRPGQGLEWIGEINPTNGRTNYIEKFKSKATLTVDKSSSTAYMQLSSLTSEDSAVYYCARGTRAYHYWGQGTSVTVSS

SEQ ID NO: 125 - protein, 107 aa, Mus musculus
DIQMTQSPASLSVSVGETVTITCRASDNLYSNLAWYQQKQGKSPQLLVYDATNLADGVPSRFSGSGSGTQYSLKINSLQSEDFGTYYCQHFWGTPLTFGAGTKLELK

SEQ ID NO: 126 - protein, 9 aa, synthetic construct
  REGION 1..9: note = Synthetic
QHFAGTPLT

SEQ ID NO: 127 - protein, 8 aa, synthetic construct
  REGION 1..8: note = Synthetic
QHFAGTPL

SEQ ID NO: 128 - protein, 116 aa, synthetic construct
  REGION 1..116: note = Synthetic
EVQLVQSGAEVKKPGASVKVSCKASGYTFTSYWMHWVRQAPGQRLEWIGEINPTNGRTNYIEKFKSRATLTVDKSASTAYMELSSLRSEDTAVYYCARGTRAYHYWGQGTMVTVSS

SEQ ID NO: 129 - protein, 107 aa, synthetic construct
  REGION 1..107: note = Synthetic
DIQMTQSPSSLSASVGDRVTITCRASDNLYSNLAWYQQKPGKSPKLLVYDATNLADGVPSRFSGSGSGTDYTLTISSLQPEDFATYYCQHFWGTPLTFGQGTKVEIK

SEQ ID NO: 130 - protein, 13993 aa, Homo sapiens
TCCTGGCATCAGTTACTGTGTTGACTCACTCAGTGTTGGGATCACTCACTTTCCCCCTACAGGACTCAGATCTGGGAGGCAATTACCTTCGGAGAAAAACGAATAGGAAAAACTGAAGTGTTACTTTTTTTAAAGCTGCTGAAGTTTGTTGGTTTCTCATTGTTTTTAAGCCTACTGGAGCAATAAAGTTTGAAGAACTTTTACCAGGTTTTTTTTATCGCTGCCTTGATATACACTTTTCAAAATGCTTTGGTGGGAAGAAGTAGAGGACTGTTATGAAAGAGAAGATGTTCAAAAGAAAACATTCACAAAATGGGTAAATGCACAATTTTCTAAGTTTGGGAAGCAGCATATTGAGAACCTCTTCAGTGACCTACAGGATGGGAGGCGCCTCCTAGACCTCCTCGAAGGCCTGACAGGGCAAAAACTGCCAAAAGAAAAAGGATCCACAAGAGTTCATGCCCTGAACAATGTCAACAAGGCACTGCGGGTTTTGCAGAACAATAATGTTGATTTAGTGAATATTGGAAGTACTGACATCGTAGATGGAAATCATAAACTGACTCTTGGTTTGATTTGGAATATAATCCTCCACTGGCAGGTCAAAAATGTAATGAAAAATATCATGGCTGGATTGCAACAAACCAACAGTGAAAAGATTCTCCTGAGCTGGGTCCGACAATCAACTCGTAATTATCCACAGGTTAATGTAATCAACTTCACCACCAGCTGGTCTGATGGCCTGGCTTTGAATGCTCTCATCCATAGTCATAGGCCAGACCTATTTGACTGGAATAGTGTGGTTTGCCAGCAGTCAGCCACACAACGACTGGAACATGCATTCAACATCGCCAGATATCAATTAGGCATAGAGAAACTACTCGATCCTGAAGATGTTGATACCACCTATCCAGATAAGAAGTCCATCTTAATGTACATCACATCACTCTTCCAAGTTTTGCCTCAACAAGTGAGCATTGAAGCCATCCAGGAAGTGGAAATGTTGCCAAGGCCACCTAAAGTGACTAAAGAAGAACATTTTCAGTTACATCATCAAATGCACTATTCTCAACAGATCACGGTCAGTCTAGCACAGGGATATGAGAGAACTTCTTCCCCTAAGCCTCGATTCAAGAGCTATGCCTACACACAGGCTGCTTATGTCACCACCTCTGACCCTACACGGAGCCCATTTCCTTCACAGCATTTGGAAGCTCCTGAAGACAAGTCATTTGGCAGTTCATTGATGGAGAGTGAAGTAAACCTGGACCGTTATCAAACAGCTTTAGAAGAAGTATTATCGTGGCTTCTTTCTGCTGAGGACACATTGCAAGCACAAGGAGAGATTTCTAATGATGTGGAAGTGGTGAAAGACCAGTTTCATACTCATGAGGGGTACATGATGGATTTGACAGCCCATCAGGGCCGGGTTGGTAATATTCTACAATTGGGAAGTAAGCTGATTGGAACAGGAAAATTATCAGAAGATGAAGAAACTGAAGTACAAGAGCAGATGAATCTCCTAAATTCAAGATGGGAATGCCTCAGGGTAGCTAGCATGGAAAAACAAAGCAATTTACATAGAGTTTTAATGGATCTCCAGAATCAGAAACTGAAAGAGTTGAATGACTGGCTAACAAAAACAGAAGAAAGAACAAGGAAAATGGAGGAAGAGCCTCTTGGACCTGATCTTGAAGACCTAAAACGCCAAGTACAACAACATAAGGTGCTTCAAGAAGATCTAGAACAAGAACAAGTCAGGGTCAATTCTCTCACTCACATGGTGGTGGTAGTTGATGAATCTAGTGGAGATCACGCAACTGCTGCTTTGGAAGAACAACTTAAGGTATTGGGAGATCGATGGGCAAACATCTGTAGATGGACAGAAGACCGCTGGGTTCTTTTACAAGACATCCTTCTCAAATGGCAACGTCTTACTGAAGAACAGTGCCTTTTTAGTGCATGGCTTTCAGAAAAAGAAGATGCAGTGAACAAGATTCACACAACTGGCTTTAAAGATCAAAATGAAATGTTATCAAGTCTTCAAAAACTGGCCGTTTTAAAAGCGGATCTAGAAAAGAAAAAGCAATCCATGGGCAAACTGTATTCACTCAAACAAGATCTTCTTTCAACACTGAAGAATAAGTCAGTGACCCAGAAGACGGAAGCATGGCTGGATAACTTTGCCCGGTGTTGGGATAATTTAGTCCAAAAACTTGAAAAGAGTACAGCACAGATTTCACAGGCTGTCACCACCACTCAGCCATCACTAACACAGACAACTGTAATGGAAACAGTAACTACGGTGACCACAAGGGAACAGATCCTGGTAAAGCATGCTCAAGAGGAACTTCCACCACCACCTCCCCAAAAGAAGAGGCAGATTACTGTGGATTCTGAAATTAGGAAAAGGTTGGATGTTGATATAACTGAACTTCACAGCTGGATTACTCGCTCAGAAGCTGTGTTGCAGAGTCCTGAATTTGCAATCTTTCGGAAGGAAGGCAACTTCTCAGACTTAAAAGAAAAAGTCAATGCCATAGAGCGAGAAAAAGCTGAGAAGTTCAGAAAACTGCAAGATGCCAGCAGATCAGCTCAGGCCCTGGTGGAACAGATGGTGAATGAGGGTGTTAATGCAGATAGCATCAAACAAGCCTCAGAACAACTGAACAGCCGGTGGATCGAATTCTGCCAGTTGCTAAGTGAGAGACTTAACTGGCTGGAGTATCAGAACAACATCATCGCTTTCTATAATCAGCTACAACAATTGGAGCAGATGACAACTACTGCTGAAAACTGGTTGAAAATCCAACCCACCACCCCATCAGAGCCAACAGCAATTAAAAGTCAGTTAAAAATTTGTAAGGATGAAGTCAACCGGCTATCAGGTCTTCAACCTCAAATTGAACGATTAAAAATTCAAAGCATAGCCCTGAAAGAGAAAGGACAAGGACCCATGTTCCTGGATGCAGACTTTGTGGCCTTTACAAATCATTTTAAGCAAGTCTTTTCTGATGTGCAGGCCAGAGAGAAAGAGCTACAGACAATTTTTGACACTTTGCCACCAATGCGCTATCAGGAGACCATGAGTGCCATCAGGACATGGGTCCAGCAGTCAGAAACCAAACTCTCCATACCTCAACTTAGTGTCACCGACTATGAAATCATGGAGCAGAGACTCGGGGAATTGCAGGCTTTACAAAGTTCTCTGCAAGAGCAACAAAGTGGCCTATACTATCTCAGCACCACTGTGAAAGAGATGTCGAAGAAAGCGCCCTCTGAAATTAGCCGGAAATATCAATCAGAATTTGAAGAAATTGAGGGACGCTGGAAGAAGCTCTCCTCCCAGCTGGTTGAGCATTGTCAAAAGCTAGAGGAGCAAATGAATAAACTCCGAAAAATTCAGAATCACATACAAACCCTGAAGAAATGGATGGCTGAAGTTGATGTTTTTCTGAAGGAGGAATGGCCTGCCCTTGGGGATTCAGAAATTCTAAAAAAGCAGCTGAAACAGTGCAGACTTTTAGTCAGTGATATTCAGACAATTCAGCCCAGTCTAAACAGTGTCAATGAAGGTGGGCAGAAGATAAAGAATGAAGCAGAGCCAGAGTTTGCTTCGAGACTTGAGACAGAACTCAAAGAACTTAACACTCAGTGGGATCACATGTGCCAACAGGTCTATGCCAGAAAGGAGGCCTTGAAGGGAGGTTTGGAGAAAACTGTAAGCCTCCAGAAAGATCTATCAGAGATGCACGAATGGATGACACAAGCTGAAGAAGAGTATCTTGAGAGAGATTTTGAATATAAAACTCCAGATGAATTACAGAAAGCAGTTGAAGAGATGAAGAGAGCTAAAGAAGAGGCCCAACAAAAAGAAGCGAAAGTGAAACTCCTTACTGAGTCTGTAAATAGTGTCATAGCTCAAGCTCCACCTGTAGCACAAGAGGCCTTAAAAAAGGAACTTGAAACTCTAACCACCAACTACCAGTGGCTCTGCACTAGGCTGAATGGGAAATGCAAGACTTTGGAAGAAGTTTGGGCATGTTGGCATGAGTTATTGTCATACTTGGAGAAAGCAAACAAGTGGCTAAATGAAGTAGAATTTAAACTTAAAACCACTGAAAACATTCCTGGCGGAGCTGAGGAAATCTCTGAGGTGCTAGATTCACTTGAAAATTTGATGCGACATTCAGAGGATAACCCAAATCAGATTCGCATATTGGCACAGACCCTAACAGATGGCGGAGTCATGGATGAGCTAATCAATGAGGAACTTGAGACATTTAATTCTCGTTGGAGGGAACTACATGAAGAGGCTGTAAGGAGGCAAAAGTTGCTTGAACAGAGCATCCAGTCTGCCCAGGAGACTGAAAAATCCTTACACTTAATCCAGGAGTCCCTCACATTCATTGACAAGCAGTTGGCAGCTTATATTGCAGACAAGGTGGACGCAGCTCAAATGCCTCAGGAAGCCCAGAAAATCCAATCTGATTTGACAAGTCATGAGATCAGTTTAGAAGAAATGAAGAAACATAATCAGGGGAAGGAGGCTGCCCAAAGAGTCCTGTCTCAGATTGATGTTGCACAGAAAAAATTACAAGATGTCTCCATGAAGTTTCGATTATTCCAGAAACCAGCCAATTTTGAGCAGCGTCTACAAGAAAGTAAGATGATTTTAGATGAAGTGAAGATGCACTTGCCTGCATTGGAAACAAAGAGTGTGGAACAGGAAGTAGTACAGTCACAGCTAAATCATTGTGTGAACTTGTATAAAAGTCTGAGTGAAGTGAAGTCTGAAGTGGAAATGGTGATAAAGACTGGACGTCAGATTGTACAGAAAAAGCAGACGGAAAATCCCAAAGAACTTGATGAAAGAGTAACAGCTTTGAAATTGCATTATAATGAGCTGGGAGCAAAGGTAACAGAAAGAAAGCAACAGTTGGAGAAATGCTTGAAATTGTCCCGTAAGATGCGAAAGGAAATGAATGTCTTGACAGAATGGCTGGCAGCTACAGATATGGAATTGACAAAGAGATCAGCAGTTGAAGGAATGCCTAGTAATTTGGATTCTGAAGTTGCCTGGGGAAAGGCTACTCAAAAAGAGATTGAGAAACAGAAGGTGCACCTGAAGAGTATCACAGAGGTAGGAGAGGCCTTGAAAACAGTTTTGGGCAAGAAGGAGACGTTGGTGGAAGATAAACTCAGTCTTCTGAATAGTAACTGGATAGCTGTCACCTCCCGAGCAGAAGAGTGGTTAAATCTTTTGTTGGAATACCAGAAACACATGGAAACTTTTGACCAGAATGTGGACCACATCACAAAGTGGATCATTCAGGCTGACACACTTTTGGATGAATCAGAGAAAAAGAAACCCCAGCAAAAAGAAGACGTGCTTAAGCGTTTAAAGGCAGAACTGAATGACATACGCCCAAAGGTGGACTCTACACGTGACCAAGCAGCAAACTTGATGGCAAACCGCGGTGACCACTGCAGGAAATTAGTAGAGCCCCAAATCTCAGAGCTCAACCATCGATTTGCAGCCATTTCACACAGAATTAAGACTGGAAAGGCCTCCATTCCTTTGAAGGAATTGGAGCAGTTTAACTCAGATATACAAAAATTGCTTGAACCACTGGAGGCTGAAATTCAGCAGGGGGTGAATCTGAAAGAGGAAGACTTCAATAAAGATATGAATGAAGACAATGAGGGTACTGTAAAAGAATTGTTGCAAAGAGGAGACAACTTACAACAAAGAATCACAGATGAGAGAAAGCGAGAGGAAATAAAGATAAAACAGCAGCTGTTACAGACAAAACATAATGCTCTCAAGGATTTGAGGTCTCAAAGAAGAAAAAAGGCTCTAGAAATTTCTCATCAGTGGTATCAGTACAAGAGGCAGGCTGATGATCTCCTGAAATGCTTGGATGACATTGAAAAAAAATTAGCCAGCCTACCTGAGCCCAGAGATGAAAGGAAAATAAAGGAAATTGATCGGGAATTGCAGAAGAAGAAAGAGGAGCTGAATGCAGTGCGTAGGCAAGCTGAGGGCTTGTCTGAGGATGGGGCCGCAATGGCAGTGGAGCCAACTCAGATCCAGCTCAGCAAGCGCTGGCGGGAAATTGAGAGCAAATTTGCTCAGTTTCGAAGACTCAACTTTGCACAAATTCACACTGTCCGTGAAGAAACGATGATGGTGATGACTGAAGACATGCCTTTGGAAATTTCTTATGTGCCTTCTACTTATTTGACTGAAATCACTCATGTCTCACAAGCCCTATTAGAAGTGGAACAACTTCTCAATGCTCCTGACCTCTGTGCTAAGGACTTTGAAGATCTCTTTAAGCAAGAGGAGTCTCTGAAGAATATAAAAGATAGTCTACAACAAAGCTCAGGTCGGATTGACATTATTCATAGCAAGAAGACAGCAGCATTGCAAAGTGCAACGCCTGTGGAAAGGGTGAAGCTACAGGAAGCTCTCTCCCAGCTTGATTTCCAATGGGAAAAAGTTAACAAAATGTACAAGGACCGACAAGGGCGATTTGACAGATCTGTTGAGAAATGGCGGCGTTTTCATTATGATATAAAGATATTTAATCAGTGGCTAACAGAAGCTGAACAGTTTCTCAGAAAGACACAAATTCCTGAGAATTGGGAACATGCTAAATACAAATGGTATCTTAAGGAACTCCAGGATGGCATTGGGCAGCGGCAAACTGTTGTCAGAACATTGAATGCAACTGGGGAAGAAATAATTCAGCAATCCTCAAAAACAGATGCCAGTATTCTACAGGAAAAATTGGGAAGCCTGAATCTGCGGTGGCAGGAGGTCTGCAAACAGCTGTCAGACAGAAAAAAGAGGCTAGAAGAACAAAAGAATATCTTGTCAGAATTTCAAAGAGATTTAAATGAATTTGTTTTATGGTTGGAGGAAGCAGATAACATTGCTAGTATCCCACTTGAACCTGGAAAAGAGCAGCAACTAAAAGAAAAGCTTGAGCAAGTCAAGTTACTGGTGGAAGAGTTGCCCCTGCGCCAGGGAATTCTCAAACAATTAAATGAAACTGGAGGACCCGTGCTTGTAAGTGCTCCCATAAGCCCAGAAGAGCAAGATAAACTTGAAAATAAGCTCAAGCAGACAAATCTCCAGTGGATAAAGGTTTCCAGAGCTTTACCTGAGAAACAAGGAGAAATTGAAGCTCAAATAAAAGACCTTGGGCAGCTTGAAAAAAAGCTTGAAGACCTTGAAGAGCAGTTAAATCATCTGCTGCTGTGGTTATCTCCTATTAGGAATCAGTTGGAAATTTATAACCAACCAAACCAAGAAGGACCATTTGACGTTCAGGAAACTGAAATAGCAGTTCAAGCTAAACAACCGGATGTGGAAGAGATTTTGTCTAAAGGGCAGCATTTGTACAAGGAAAAACCAGCCACTCAGCCAGTGAAGAGGAAGTTAGAAGATCTGAGCTCTGAGTGGAAGGCGGTAAACCGTTTACTTCAAGAGCTGAGGGCAAAGCAGCCTGACCTAGCTCCTGGACTGACCACTATTGGAGCCTCTCCTACTCAGACTGTTACTCTGGTGACACAACCTGTGGTTACTAAGGAAACTGCCATCTCCAAACTAGAAATGCCATCTTCCTTGATGTTGGAGGTACCTGCTCTGGCAGATTTCAACCGGGCTTGGACAGAACTTACCGACTGGCTTTCTCTGCTTGATCAAGTTATAAAATCACAGAGGGTGATGGTGGGTGACCTTGAGGATATCAACGAGATGATCATCAAGCAGAAGGCAACAATGCAGGATTTGGAACAGAGGCGTCCCCAGTTGGAAGAACTCATTACCGCTGCCCAAAATTTGAAAAACAAGACCAGCAATCAAGAGGCTAGAACAATCATTACGGATCGAATTGAAAGAATTCAGAATCAGTGGGATGAAGTACAAGAACACCTTCAGAACCGGAGGCAACAGTTGAATGAAATGTTAAAGGATTCAACACAATGGCTGGAAGCTAAGGAAGAAGCTGAGCAGGTCTTAGGACAGGCCAGAGCCAAGCTTGAGTCATGGAAGGAGGGTCCCTATACAGTAGATGCAATCCAAAAGAAAATCACAGAAACCAAGCAGTTGGCCAAAGACCTCCGCCAGTGGCAGACAAATGTAGATGTGGCAAATGACTTGGCCCTGAAACTTCTCCGGGATTATTCTGCAGATGATACCAGAAAAGTCCACATGATAACAGAGAATATCAATGCCTCTTGGAGAAGCATTCATAAAAGGGTGAGTGAGCGAGAGGCTGCTTTGGAAGAAACTCATAGATTACTGCAACAGTTCCCCCTGGACCTGGAAAAGTTTCTTGCCTGGCTTACAGAAGCTGAAACAACTGCCAATGTCCTACAGGATGCTACCCGTAAGGAAAGGCTCCTAGAAGACTCCAAGGGAGTAAAAGAGCTGATGAAACAATGGCAAGACCTCCAAGGTGAAATTGAAGCTCACACAGATGTTTATCACAACCTGGATGAAAACAGCCAAAAAATCCTGAGATCCCTGGAAGGTTCCGATGATGCAGTCCTGTTACAAAGACGTTTGGATAACATGAACTTCAAGTGGAGTGAACTTCGGAAAAAGTCTCTCAACATTAGGTCCCATTTGGAAGCCAGTTCTGACCAGTGGAAGCGTCTGCACCTTTCTCTGCAGGAACTTCTGGTGTGGCTACAGCTGAAAGATGATGAATTAAGCCGGCAGGCACCTATTGGAGGCGACTTTCCAGCAGTTCAGAAGCAGAACGATGTACATAGGGCCTTCAAGAGGGAATTGAAAACTAAAGAACCTGTAATCATGAGTACTCTTGAGACTGTACGAATATTTCTGACAGAGCAGCCTTTGGAAGGACTAGAGAAACTCTACCAGGAGCCCAGAGAGCTGCCTCCTGAGGAGAGAGCCCAGAATGTCACTCGGCTTCTACGAAAGCAGGCTGAGGAGGTCAATACTGAGTGGGAAAAATTGAACCTGCACTCCGCTGACTGGCAGAGAAAAATAGATGAGACCCTTGAAAGACTCCAGGAACTTCAAGAGGCCACGGATGAGCTGGACCTCAAGCTGCGCCAAGCTGAGGTGATCAAGGGATCCTGGCAGCCCGTGGGCGATCTCCTCATTGACTCTCTCCAAGATCACCTCGAGAAAGTCAAGGCACTTCGAGGAGAAATTGCGCCTCTGAAAGAGAACGTGAGCCACGTCAATGACCTTGCTCGCCAGCTTACCACTTTGGGCATTCAGCTCTCACCGTATAACCTCAGCACTCTGGAAGACCTGAACACCAGATGGAAGCTTCTGCAGGTGGCCGTCGAGGACCGAGTCAGGCAGCTGCATGAAGCCCACAGGGACTTTGGTCCAGCATCTCAGCACTTTCTTTCCACGTCTGTCCAGGGTCCCTGGGAGAGAGCCATCTCGCCAAACAAAGTGCCCTACTATATCAACCACGAGACTCAAACAACTTGCTGGGACCATCCCAAAATGACAGAGCTCTACCAGTCTTTAGCTGACCTGAATAATGTCAGATTCTCAGCTTATAGGACTGCCATGAAACTCCGAAGACTGCAGAAGGCCCTTTGCTTGGATCTCTTGAGCCTGTCAGCTGCATGTGATGCCTTGGACCAGCACAACCTCAAGCAAAATGACCAGCCCATGGATATCCTGCAGATTATTAATTGTTTGACCACTATTTATGACCGCCTGGAGCAAGAGCACAACAATTTGGTCAACGTCCCTCTCTGCGTGGATATGTGTCTGAACTGGCTGCTGAATGTTTATGATACGGGACGAACAGGGAGGATCCGTGTCCTGTCTTTTAAAACTGGCATCATTTCCCTGTGTAAAGCACATTTGGAAGACAAGTACAGATACCTTTTCAAGCAAGTGGCAAGTTCAACAGGATTTTGTGACCAGCGCAGGCTGGGCCTCCTTCTGCATGATTCTATCCAAATTCCAAGACAGTTGGGTGAAGTTGCATCCTTTGGGGGCAGTAACATTGAGCCAAGTGTCCGGAGCTGCTTCCAATTTGCTAATAATAAGCCAGAGATCGAAGCGGCCCTCTTCCTAGACTGGATGAGACTGGAACCCCAGTCCATGGTGTGGCTGCCCGTCCTGCACAGAGTGGCTGCTGCAGAAACTGCCAAGCATCAGGCCAAATGTAACATCTGCAAAGAGTGTCCAATCATTGGATTCAGGTACAGGAGTCTAAAGCACTTTAATTATGACATCTGCCAAAGCTGCTTTTTTTCTGGTCGAGTTGCAAAAGGCCATAAAATGCACTATCCCATGGTGGAATATTGCACTCCGACTACATCAGGAGAAGATGTTCGAGACTTTGCCAAGGTACTAAAAAACAAATTTCGAACCAAAAGGTATTTTGCGAAGCATCCCCGAATGGGCTACCTGCCAGTGCAGACTGTCTTAGAGGGGGACAACATGGAAACTCCCGTTACTCTGATCAACTTCTGGCCAGTAGATTCTGCGCCTGCCTCGTCCCCTCAGCTTTCACACGATGATACTCATTCACGCATTGAACATTATGCTAGCAGGCTAGCAGAAATGGAAAACAGCAATGGATCTTATCTAAATGATAGCATCTCTCCTAATGAGAGCATAGATGATGAACATTTGTTAATCCAGCATTACTGCCAAAGTTTGAACCAGGACTCCCCCCTGAGCCAGCCTCGTAGTCCTGCCCAGATCTTGATTTCCTTAGAGAGTGAGGAAAGAGGGGAGCTAGAGAGAATCCTAGCAGATCTTGAGGAAGAAAACAGGAATCTGCAAGCAGAATATGACCGTCTAAAGCAGCAGCACGAACATAAAGGCCTGTCCCCACTGCCGTCCCCTCCTGAAATGATGCCCACCTCTCCCCAGAGTCCCCGGGATGCTGAGCTCATTGCTGAGGCCAAGCTACTGCGTCAACACAAAGGCCGCCTGGAAGCCAGGATGCAAATCCTGGAAGACCACAATAAACAGCTGGAGTCACAGTTACACAGGCTAAGGCAGCTGCTGGAGCAACCCCAGGCAGAGGCCAAAGTGAATGGCACAACGGTGTCCTCTCCTTCTACCTCTCTACAGAGGTCCGACAGCAGTCAGCCTATGCTGCTCCGAGTGGTTGGCAGTCAAACTTCGGACTCCATGGGTGAGGAAGATCTTCTCAGTCCTCCCCAGGACACAAGCACAGGGTTAGAGGAGGTGATGGAGCAACTCAACAACTCCTTCCCTAGTTCAAGAGGAAGAAATACCCCTGGAAAGCCAATGAGAGAGGACACAATGTAGGAAGTCTTTTCCACATGGCAGATGATTTGGGCAGAGCGATGGAGTCCTTAGTATCAGTCATGACAGATGAAGAAGGAGCAGAATAAATGTTTTACAACTCCTGATTCCCGCATGGTTTTTATAATATTCATACAACAAAGAGGATTAGACAGTAAGAGTTTACAAGAAATAAATCTATATTTTTGTGAAGGGTAGTGGTATTATACTGTAGATTTCAGTAGTTTCTAAGTCTGTTATTGTTTTGTTAACAATGGCAGGTTTTACACGTCTATGCAATTGTACAAAAAAGTTATAAGAAAACTACATGTAAAATCTTGATAGCTAAATAACTTGCCATTTCTTTATATGGAACGCATTTTGGGTTGTTTAAAAATTTATAACAGTTATAAAGAAAGATTGTAAACTAAAGTGTGCTTTATAAAAAAAAGTTGTTTATAAAAACCCCTAAAAACAAAACAAACACACACACACACACATACACACACACACACAAAACTTTGAGGCAGCGCATTGTTTTGCATCCTTTTGGCGTGATATCCATATGAAATTCATGGCTTTTTCTTTTTTTGCATATTAAAGATAAGACTTCCTCTACCACCACACCAAATGACTACTACACACTGCTCATTTGAGAACTGTCAGCTGAGTGGGGCAGGCTTGAGTTTTCATTTCATATATCTATATGTCTATAAGTATATAAATACTATAGTTATATAGATAAAGAGATACGAATTTCTATAGACTGACTTTTTCCATTTTTTAAATGTTCATGTCACATCCTAATAGAAAGAAATTACTTCTAGTCAGTCATCCAGGCTTACCTGCTTGGTCTAGAATGGATTTTTCCCGGAGCCGGAAGCCAGGAGGAAACTACACCACACTAAAACATTGTCTACAGCTCCAGATGTTTCTCATTTTAAACAACTTTCCACTGACAACGAAAGTAAAGTAAAGTATTGGATTTTTTTAAAGGGAACATGTGAATGAATACACAGGACTTATTATATCAGAGTGAGTAATCGGTTGGTTGGTTGATTGATTGATTGATTGATACATTCAGCTTCCTGCTGCTAGCAATGCCACGATTTAGATTTAATGATGCTTCAGTGGAAATCAATCAGAAGGTATTCTGACCTTGTGAACATCAGAAGGTATTTTTTAACTCCCAAGCAGTAGCAGGACGATGATAGGGCTGGAGGGCTATGGATTCCCAGCCCATCCCTGTGAAGGAGTAGGCCACTCTTTAAGTGAAGGATTGGATGATTGTTCATAATACATAAAGTTCTCTGTAATTACAACTAAATTATTATGCCCTCTTCTCACAGTCAAAAGGAACTGGGTGGTTTGGTTTTTGTTGCTTTTTTAGATTTATTGTCCCATGTGGGATGAGTTTTTAAATGCCACAAGACATAATTTAAAATAAATAAACTTTGGGAAAAGGTGTAAAACAGTAGCCCCATCACATTTGTGATACTGACAGGTATCAACCCAGAAGCCCATGAACTGTGTTTCCATCCTTTGCATTTCTCTGCGAGTAGTTCCACACAGGTTTGTAAGTAAGTAAGAAAGAAGGCAAATTGATTCAAATGTTACAAAAAAACCCTTCTTGGTGGATTAGACAGGTTAAATATATAAACAAACAAACAAAAATTGCTCAAAAAAGAGGAGAAAAGCTCAAGAGGAAAAGCTAAGGACTGGTAGGAAAAAGCTTTACTCTTTCATGCCATTTTATTTCTTTTTGATTTTTAAATCATTCATTCAATAGATACCACCGTGTGACCTATAATTTTGCAAATCTGTTACCTCTGACATCAAGTGTAATTAGCTTTTGGAGAGTGGGCTGACATCAAGTGTAATTAGCTTTTGGAGAGTGGGTTTTGTCCATTATTAATAATTAATTAATTAACATCAAACACGGCTTCTCATGCTATTTCTACCTCACTTTGGTTTTGGGGTGTTCCTGATAATTGTGCACACCTGAGTTCACAGCTTCACCACTTGTCCATTGCGTTATTTTCTTTTTCCTTTATAATTCTTTCTTTTTCCTTCATAATTTTCAAAAGAAAACCCAAAGCTCTAAGGTAACAAATTACCAAATTACATGAAGATTTGGTTTTTGTCTTGCATTTTTTTCCTTTATGTGACGCTGGACCTTTTCTTTACCCAAGGATTTTTAAAACTCAGATTTAAAACAAGGGGTTACTTTACATCCTACTAAGAAGTTTAAGTAAGTAAGTTTCATTCTAAAATCAGAGGTAAATAGAGTGCATAAATAATTTTGTTTTAATCTTTTTGTTTTTCTTTTAGACACATTAGCTCTGGAGTGAGTCTGTCATAATATTTGAACAAAAATTGAGAGCTTTATTGCTGCATTTTAAGCATAATTAATTTGGACATTATTTCGTGTTGTGTTCTTTATAACCACCAAGTATTAAACTGTAAATCATAATGTAACTGAAGCATAAACATCACATGGCATGTTTTGTCATTGTTTTCAGGTACTGAGTTCTTACTTGAGTATCATAATATATTGTGTTTTAACACCAACACTGTAACATTTACGAATTATTTTTTTAAACTTCAGTTTTACTGCATTTTCACAACATATCAGACTTCACCAAATATATGCCTTACTATTGTATTATAGTACTGCTTTACTGTGTATCTCAATAAAGCACGCAGTTATGTTAC

SEQ ID NO: 131 - protein, 7 aa, synthetic construct
  REGION 1..7: note = Synthetic
TGGAGGT

SEQ ID NO: 132 - protein, 446 aa, synthetic construct
  REGION 1..446: note = Synthetic
QVQLQQPGAELVKPGASVKLSCKASGYTFTSYWMHWVKQRPGQGLEWIGEINPTNGRTNYIEKFKSKATLTVDKSSSTAYMQLSSLTSEDSAVYYCARGTRAYHYWGQGTSVTVSSASTKGPSVFPLAPSSKSTSGGTAALGCLVKDYFPEPVTVSWNSGALTSGVHTFPAVLQSSGLYSLSSVVTVPSSSLGTQTYICNVNHKPSNTKVDKKVEPKSCDKTHTCPPCPAPELLGGPSVFLFPPKPKDTLMISRTPEVTCVVVDVSHEDPEVKFNWYVDGVEVHNAKTKPREEQYNSTYRVVSVLTVLHQDWLNGKEYKCKVSNKALPAPIEKTISKAKGQPREPQVYTLPPSRDELTKNQVSLTCLVKGFYPSDIAVEWESNGQPENNYKTTPPVLDSDGSFFLYSKLTVDKSRWQQGNVFSCSVMHEALHNHYTQKSLSLSPGK

SEQ ID NO: 133 - protein, 214 aa, synthetic construct
  REGION 1..214: note = Synthetic
DIQMTQSPASLSVSVGETVTITCRASDNLYSNLAWYQQKQGKSPQLLVYDATNLADGVPSRFSGSGSGTQYSLKINSLQSEDFGTYYCQHFWGTPLTFGAGTKLELKRTVAAPSVFIFPPSDEQLKSGTASVVCLLNNFYPREAKVQWKVDNALQSGNSQESVTEQDSKDSTYSLSSTLTLSKADYEKHKVYACEVTHQGLSSPVTKSFNRGEC

SEQ ID NO: 134 - protein, 446 aa, Homo sapiens
EVQLVQSGAEVKKPGASVKVSCKASGYTFTSYWMHWVRQAPGQRLEWIGEINPTNGRTNYIEKFKSRATLTVDKSASTAYMELSSLRSEDTAVYYCARGTRAYHYWGQGTMVTVSSASTKGPSVFPLAPSSKSTSGGTAALGCLVKDYFPEPVTVSWNSGALTSGVHTFPAVLQSSGLYSLSSVVTVPSSSLGTQTYICNVNHKPSNTKVDKKVEPKSCDKTHTCPPCPAPELLGGPSVFLFPPKPKDTLMISRTPEVTCVVVDVSHEDPEVKFNWYVDGVEVHNAKTKPREEQYNSTYRVVSVLTVLHQDWLNGKEYKCKVSNKALPAPIEKTISKAKGQPREPQVYTLPPSRDELTKNQVSLTCLVKGFYPSDIAVEWESNGQPENNYKTTPPVLDSDGSFFLYSKLTVDKSRWQQGNVFSCSVMHEALHNHYTQKSLSLSPGK

SEQ ID NO: 135 - protein, 214 aa, Homo sapiens
DIQMTQSPSSLSASVGDRVTITCRASDNLYSNLAWYQQKPGKSPKLLVYDATNLADGVPSRFSGSGSGTDYTLTISSLQPEDFATYYCQHFWGTPLTFGQGTKVEIKRTVAAPSVFIFPPSDEQLKSGTASVVCLLNNFYPREAKVQWKVDNALQSGNSQESVTEQDSKDSTYSLSSTLTLSKADYEKHKVYACEVTHQGLSSPVTKSFNRGEC

SEQ ID NO: 136 - protein, 226 aa, synthetic construct
  REGION 1..226: note = Synthetic
QVQLQQPGAELVKPGASVKLSCKASGYTFTSYWMHWVKQRPGQGLEWIGEINPTNGRTNYIEKFKSKATLTVDKSSSTAYMQLSSLTSEDSAVYYCARGTRAYHYWGQGTSVTVSSASTKGPSVFPLAPSSKSTSGGTAALGCLVKDYFPEPVTVSWNSGALTSGVHTFPAVLQSSGLYSLSSVVTVPSSSLGTQTYICNVNHKPSNTKVDKKVEPKSCDKTHTCP

SEQ ID NO: 137 - protein, 226 aa, Homo sapiens
EVQLVQSGAEVKKPGASVKVSCKASGYTFTSYWMHWVRQAPGQRLEWIGEINPTNGRTNYIEKFKSRATLTVDKSASTAYMELSSLRSEDTAVYYCARGTRAYHYWGQGTMVTVSSASTKGPSVFPLAPSSKSTSGGTAALGCLVKDYFPEPVTVSWNSGALTSGVHTFPAVLQSSGLYSLSSVVTVPSSSLGTQTYICNVNHKPSNTKVDKKVEPKSCDKTHTCP

SEQ ID NO: 138 - protein, 8 aa, synthetic construct
  REGION 1..8: note = Synthetic
GYSFTSYW

SEQ ID NO: 139 - protein, 8 aa, synthetic construct
  REGION 1..8: note = Synthetic
IYPGDSDT

SEQ ID NO: 140 - protein, 15 aa, synthetic construct
  REGION 1..15: note = Synthetic
ARFPYDSSGYYSFDY

SEQ ID NO: 141 - protein, 6 aa, synthetic construct
  REGION 1..6: note = Synthetic
QSISSY

SEQ ID NO: 142 - skipped

SEQ ID NO: 143 - protein, 9 aa, synthetic construct
  REGION 1..9: note = Synthetic
QQSYSTPLT

SEQ ID NO: 144 - protein, 5 aa, synthetic construct
  REGION 1..5: note = Synthetic
SYWIG

SEQ ID NO: 145 - protein, 18 aa, synthetic construct
  REGION 1..18: note = Synthetic
IIYPGDSDTRYSPSFQGQ

SEQ ID NO: 146 - protein, 13 aa, synthetic construct
  REGION 1..13: note = Synthetic
FPYDSSGYYSFDY

SEQ ID NO: 147 - protein, 11 aa, synthetic construct
  REGION 1..11: note = Synthetic
RASQSISSYLN

SEQ ID NO: 148 - protein, 7 aa, synthetic construct
  REGION 1..7: note = Synthetic
AASSLQS

SEQ ID NO: 149 - protein, 7 aa, synthetic construct
  REGION 1..7: note = Synthetic
GYSFTSY

SEQ ID NO: 150 - skipped

SEQ ID NO: 151 - protein, 11 aa, synthetic construct
  REGION 1..11: note = Synthetic
PYDSSGYYSFD

SEQ ID NO: 152 - protein, 7 aa, synthetic construct
  REGION 1..7: note = Synthetic
SQSISSY

SEQ ID NO: 153 - protein, 6 aa, synthetic construct
  REGION 1..6: note = Synthetic
SYSTPL

SEQ ID NO: 154 - protein, 122 aa, synthetic construct
  REGION 1..122: note = Synthetic
QVQLVQSGAEVKKPGESLKISCKGSGYSFTSYWIGWVRQMPGKGLEWMGIIYPGDSDTRYSPSFQGQVTISADKSISTAYLQWSSLKASDTAMYYCARFPYDSSGYYSFDYWGQGTLVTVSS

SEQ ID NO: 155 - protein, 107 aa, synthetic construct [sequence omitted]

SEQ ID NO: 156 - protein, 452 aa, synthetic construct
  REGION 1..452: note = Synthetic
QVQLVQSGAEVKKPGESLKISCKGSGYSFTSYWIGWVRQMPGKGLEWMGIIYPGDSDTRYSPSFQGQVTISADKSISTAYLQWSSLKASDTAMYYCARFPYDSSGYYSFDYWGQGTLVTVSSASTKGPSVFPLAPSSKSTSGGTAALGCLVKDYFPEPVTVSWNSGALTSGVHTFPAVLQSSGLYSLSSVVTVPSSSLGTQTYICNVNHKPSNTKVDKKVEPKSCDKTHTCPPCPAPELLGGPSVFLFPPKPKDTLMISRTPEVTCVVVDVSHEDPEVKFNWYVDGVEVHNAKTKPREEQYNSTYRVVSVLTVLHQDWLNGKEYKCKVSNKALPAPIEKTISKAKGQPREPQVYTLPPSRDELTKNQVSLTCLVKGFYPSDIAVEWESNGQPENNYKTTPPVLDSDGSFFLYSKLTVDKSRWQQGNVFSCSVMHEALHNHYTQKSLSLSPGK

SEQ ID NO: 157 - protein, 214 aa, synthetic construct
  REGION 1..214: note = Synthetic
DIQMTQSPSSLSASVGDRVTITCRASQSISSYLNWYQQKPGKAPKLLIYAASSLQSGVPSRFSGSGSGTDFTLTISSLQPEDFATYYCQQSYSTPLTFGGGTKVEIKRTVAAPSVFIFPPSDEQLKSGTASVVCLLNNFYPREAKVQWKVDNALQSGNSQESVTEQDSKDSTYSLSSTLTLSKADYEKHKVYACEVTHQGLSSPVTKSFNRGEC

SEQ ID NO: 158 - protein, 232 aa, synthetic construct
  REGION 1..232: note = Synthetic
QVQLVQSGAEVKKPGESLKISCKGSGYSFTSYWIGWVRQMPGKGLEWMGIIYPGDSDTRYSPSFQGQVTISADKSISTAYLQWSSLKASDTAMYYCARFPYDSSGYYSFDYWGQGTLVTVSSASTKGPSVFPLAPSSKSTSGGTAALGCLVKDYFPEPVTVSWNSGALTSGVHTFPAVLQSSGLYSLSSVVTVPSSSLGTQTYICNVNHKPSNTKVDKKVEPKSCDKTHTCP

SEQ ID NO: 159 - protein, 230 aa, synthetic construct
  REGION 1..230: note = Synthetic
QVQLVQSGAEVKKPGESLKISCKGSGYSFTSYWIGWVRQMPGKGLEWMGIIYPGDSDTRYSPSFQGQVTISADKSISTAYLQWSSLKASDTAMYYCARFPYDSSGYYSFDYWGQGTLVTVSSASTKGPSVFPLAPSSKSTSGGTAALGCLVKDYFPEPVTVSWNSGALTSGVHTFPAVLQSSGLYSLSSVVTVPSSSLGTQTYICNVNHKPSNTKVDKKVEPKSCDKTHT

SEQ ID NO: 160 - RNA, 24 nt, synthetic construct
  misc_feature 1..24: note = Synthetic
  source 1..24: mol_type = other RNA
ggaagaaactcatagattactgca

SEQ ID NO: 161 - RNA, 22 nt, synthetic construct
  misc_feature 1..22: note = Synthetic
  source 1..22: mol_type = other RNA
gaaacaactgccaatgtcctac

SEQ ID NO: 162 - RNA, 23 nt, synthetic construct
  misc_feature 1..23: note = Synthetic
  source 1..23: mol_type = other RNA
gaaacaactgccaatgtcctaca

SEQ ID NO: 163 - RNA, 24 nt, synthetic construct
  misc_feature 1..24: note = Synthetic
  source 1..24: mol_type = other RNA
gaaacaactgccaatgtcctacag

SEQ ID NO: 164 - RNA, 25 nt, synthetic construct
  misc_feature 1..25: note = Synthetic
  source 1..25: mol_type = other RNA
gaaacaactgccaatgtcctacagg

SEQ ID NO: 165 - RNA, 24 nt, synthetic construct
  misc_feature 1..24: note = Synthetic
  source 1..24: mol_type = other RNA
aaacaactgccaatgtcctacagg

SEQ ID NO: 166 - RNA, 25 nt, synthetic construct
  misc_feature 1..25: note = Synthetic
  source 1..25: mol_type = other RNA
aaacaactgccaatgtcctacagga

SEQ ID NO: 167 - RNA, 22 nt, synthetic construct
  misc_feature 1..22: note = Synthetic
  source 1..22: mol_type = other RNA
aacaactgccaatgtcctacag

SEQ ID NO: 168 - RNA, 23 nt, synthetic construct
  misc_feature 1..23: note = Synthetic
  source 1..23: mol_type = other RNA
aacaactgccaatgtcctacagg

SEQ ID NO: 169 - RNA, 24 nt, synthetic construct
  misc_feature 1..24: note = Synthetic
  source 1..24: mol_type = other RNA
aacaactgccaatgtcctacagga

SEQ ID NO: 170 - RNA, 20 nt, synthetic construct
  misc_feature 1..20: note = Synthetic
  source 1..20: mol_type = other RNA
acaactgccaatgtcctaca

SEQ ID NO: 171 - RNA, 21 nt, synthetic construct
  misc_feature 1..21: note = Synthetic
  source 1..21: mol_type = other RNA
acaactgccaatgtcctacag

SEQ ID NO: 172 - RNA, 22 nt, synthetic construct
  misc_feature 1..22: note = Synthetic
  source 1..22: mol_type = other RNA
acaactgccaatgtcctacagg

SEQ ID NO: 173 - RNA, 23 nt, synthetic construct
  misc_feature 1..23: note = Synthetic
  source 1..23: mol_type = other RNA
acaactgccaatgtcctacagga

SEQ ID NO: 174 - RNA, 21 nt, synthetic construct
  misc_feature 1..21: note = Synthetic
  source 1..21: mol_type = other RNA
caactgccaatgtcctacagg

SEQ ID NO: 175 - RNA, 22 nt, synthetic construct
  misc_feature 1..22: note = Synthetic
  source 1..22: mol_type = other RNA
caactgccaatgtcctacagga

SEQ ID NO: 176 - RNA, 21 nt, synthetic construct
  misc_feature 1..21: note = Synthetic
  source 1..21: mol_type = other RNA
aactgccaatgtcctacagga

SEQ ID NO: 177 - RNA, 20 nt, synthetic construct
  misc_feature 1..20: note = Synthetic
  source 1..20: mol_type = other RNA
actgccaatgtcctacagga

SEQ ID NO: 178 - RNA, 24 nt, synthetic construct
  misc_feature 1..24: note = Synthetic
  source 1..24: mol_type = other RNA
agaaactcatagattactgcaaca

SEQ ID NO: 179 - RNA, 25 nt, synthetic construct
  misc_feature 1..25: note = Synthetic
  source 1..25: mol_type = other RNA
agaaactcatagattactgcaacag

SEQ ID NO: 180 - RNA, 24 nt, synthetic construct
  misc_feature 1..24: note = Synthetic
  source 1..24: mol_type = other RNA
gaaactcatagattactgcaacag

SEQ ID NO: 181 - RNA, 23 nt, synthetic construct
  misc_feature 1..23: note = Synthetic
  source 1..23: mol_type = other RNA
gatgataccagaaaagtccacat

SEQ ID NO: 182 - RNA, 25 nt, synthetic construct
  misc_feature 1..25: note = Synthetic
  source 1..25: mol_type = other RNA
gatgataccagaaaagtccacatga

SEQ ID NO: 183 - RNA, 24 nt, synthetic construct
  misc_feature 1..24: note = Synthetic
  source 1..24: mol_type = other RNA
atgataccagaaaagtccacatga

SEQ ID NO: 184 - RNA, 25 nt, synthetic construct
  misc_feature 1..25: note = Synthetic
  source 1..25: mol_type = other RNA
atgataccagaaaagtccacatgat

SEQ ID NO: 185 - RNA, 23 nt, synthetic construct
  misc_feature 1..23: note = Synthetic
  source 1..23: mol_type = other RNA
tgataccagaaaagtccacatga

SEQ ID NO: 186 - RNA, 24 nt, synthetic construct
  misc_feature 1..24: note = Synthetic
  source 1..24: mol_type = other RNA
tgataccagaaaagtccacatgat

SEQ ID NO: 187 - RNA, 22 nt, synthetic construct
  misc_feature 1..22: note = Synthetic
  source 1..22: mol_type = other RNA
gataccagaaaagtccacatga

SEQ ID NO: 188 - RNA, 23 nt, synthetic construct
  misc_feature 1..23: note = Synthetic
  source 1..23: mol_type = other RNA
gataccagaaaagtccacatgat

SEQ ID NO: 189 - RNA, 25 nt, synthetic construct
  misc_feature 1..25: note = Synthetic
  source 1..25: mol_type = other RNA
gataccagaaaagtccacatgataa

SEQ ID NO: 190 - RNA, 21 nt, synthetic construct
  misc_feature 1..21: note = Synthetic
  source 1..21: mol_type = other RNA
ataccagaaaagtccacatga

SEQ ID NO: 191 - RNA, 22 nt, synthetic construct
  misc_feature 1..22: note = Synthetic
  source 1..22: mol_type = other RNA
ataccagaaaagtccacatgat

SEQ ID NO: 192 - RNA, 25 nt, synthetic construct
  misc_feature 1..25: note = Synthetic
  source 1..25: mol_type = other RNA
ataccagaaaagtccacatgataac

SEQ ID NO: 193 - RNA, 20 nt, synthetic construct
  misc_feature 1..20: note = Synthetic
  source 1..20: mol_type = other RNA
taccagaaaagtccacatga

SEQ ID NO: 194 - RNA, 21 nt, synthetic construct
  misc_feature 1..21: note = Synthetic
  source 1..21: mol_type = other RNA
taccagaaaagtccacatgat

SEQ ID NO: 195 - RNA, 23 nt, synthetic construct
  misc_feature 1..23: note = Synthetic
  source 1..23: mol_type = other RNA
taccagaaaagtccacatgataa

SEQ ID NO: 196 - RNA, 24 nt, synthetic construct
  misc_feature 1..24: note = Synthetic
  source 1..24: mol_type = other RNA
taccagaaaagtccacatgataac

SEQ ID NO: 197 - RNA, 25 nt, synthetic construct
  misc_feature 1..25: note = Synthetic
  source 1..25: mol_type = other RNA
taccagaaaagtccacatgataaca

SEQ ID NO: 198 - RNA, 20 nt, synthetic construct
  misc_feature 1..20: note = Synthetic
  source 1..20: mol_type = other RNA
accagaaaagtccacatgat

SEQ ID NO: 199 - RNA, 22 nt, synthetic construct
  misc_feature 1..22: note = Synthetic
  source 1..22: mol_type = other RNA
accagaaaagtccacatgataa

SEQ ID NO: 200 - RNA, 23 nt, synthetic construct
  misc_feature 1..23: note = Synthetic
  source 1..23: mol_type = other RNA
accagaaaagtccacatgataac

SEQ ID NO: 201 - RNA, 24 nt, synthetic construct
  misc_feature 1..24: note = Synthetic
  source 1..24: mol_type = other RNA
accagaaaagtccacatgataaca

SEQ ID NO: 202 - RNA, 25 nt, synthetic construct
  misc_feature 1..25: note = Synthetic
  source 1..25: mol_type = other RNA
accagaaaagtccacatgataacag

SEQ ID NO: 203 - RNA, 21 nt, synthetic construct
  misc_feature 1..21: note = Synthetic
  source 1..21: mol_type = other RNA
ccagaaaagtccacatgataa

SEQ ID NO: 204 - RNA, 22 nt, synthetic construct
  misc_feature 1..22: note = Synthetic
  source 1..22: mol_type = other RNA
ccagaaaagtccacatgataac

SEQ ID NO: 205 - RNA, 23 nt, synthetic construct
  misc_feature 1..23: note = Synthetic
  source 1..23: mol_type = other RNA
ccagaaaagtccacatgataaca

SEQ ID NO: 206 - RNA, 24 nt, synthetic construct
  misc_feature 1..24: note = Synthetic
  source 1..24: mol_type = other RNA
ccagaaaagtccacatgataacag

SEQ ID NO: 207 - RNA, 25 nt, synthetic construct
  misc_feature 1..25: note = Synthetic
  source 1..25: mol_type = other RNA
ccagaaaagtccacatgataacaga

SEQ ID NO: 208 - RNA, 21 nt, synthetic construct
  misc_feature 1..21: note = Synthetic
  source 1..21: mol_type = other RNA
cagaaaagtccacatgataac

SEQ ID NO: 209 - RNA, 22 nt, synthetic construct
  misc_feature 1..22: note = Synthetic
  source 1..22: mol_type = other RNA
cagaaaagtccacatgataaca

SEQ ID NO: 210 - RNA, 23 nt, synthetic construct
  misc_feature 1..23: note = Synthetic
  source 1..23: mol_type = other RNA
cagaaaagtccacatgataacag

SEQ ID NO: 211 - RNA, 24 nt, synthetic construct
  misc_feature 1..24: note = Synthetic
  source 1..24: mol_type = other RNA
cagaaaagtccacatgataacaga

SEQ ID NO: 212 - RNA, 25 nt, synthetic construct
  misc_feature 1..25: note = Synthetic
  source 1..25: mol_type = other RNA
cagaaaagtccacatgataacagag

SEQ ID NO: 213 - RNA, 23 nt, synthetic construct
  misc_feature 1..23: note = Synthetic
  source 1..23: mol_type = other RNA
agaaaagtccacatgataacaga

SEQ ID NO: 214 - RNA, 24 nt, synthetic construct
  misc_feature 1..24: note = Synthetic
  source 1..24: mol_type = other RNA
agaaaagtccacatgataacagag

SEQ ID NO: 215 - RNA, 25 nt, synthetic construct
  misc_feature 1..25: note = Synthetic
  source 1..25: mol_type = other RNA
agaaaagtccacatgataacagaga

SEQ ID NO: 216 - RNA, 21 nt, synthetic construct
  misc_feature 1..21: note = Synthetic
  source 1..21: mol_type = other RNA
gaaaagtccacatgataacag

SEQ ID NO: 217 - RNA, 22 nt, synthetic construct
  misc_feature 1..22: note = Synthetic
  source 1..22: mol_type = other RNA
gaaaagtccacatgataacaga

SEQ ID NO: 218 - RNA, 23 nt, synthetic construct
  misc_feature 1..23: note = Synthetic
  source 1..23: mol_type = other RNA
gaaaagtccacatgataacagag

SEQ ID NO: 219 - RNA, 24 nt, synthetic construct
  misc_feature 1..24: note = Synthetic
  source 1..24: mol_type = other RNA
gaaaagtccacatgataacagaga

SEQ ID NO: 220 - RNA, 25 nt, synthetic construct
  misc_feature 1..25: note = Synthetic
  source 1..25: mol_type = other RNA
gaaaagtccacatgataacagagaa

SEQ ID NO: 221 - RNA, 22 nt, synthetic construct
  misc_feature 1..22: note = Synthetic
  source 1..22: mol_type = other RNA
aaaagtccacatgataacagag

SEQ ID NO: 222 - RNA, 23 nt, synthetic construct
  misc_feature 1..23: note = Synthetic
  source 1..23: mol_type = other RNA
aaaagtccacatgataacagaga

SEQ ID NO: 223 - RNA, 24 nt, synthetic construct
  misc_feature 1..24: note = Synthetic
  source 1..24: mol_type = other RNA
aaaagtccacatgataacagagaa

SEQ ID NO: 224 - RNA, 25 nt, synthetic construct
  misc_feature 1..25: note = Synthetic
  source 1..25: mol_type = other RNA
aaaagtccacatgataacagagaat

SEQ ID NO: 225 - RNA, 21 nt, synthetic construct
  misc_feature 1..21: note = Synthetic
  source 1..21: mol_type = other RNA
aaagtccacatgataacagag

SEQ ID NO: 226 - RNA, 22 nt, synthetic construct
  misc_feature 1..22: note = Synthetic
  source 1..22: mol_type = other RNA
aaagtccacatgataacagaga

SEQ ID NO: 227 - RNA, 23 nt, synthetic construct
  misc_feature 1..23: note = Synthetic
  source 1..23: mol_type = other RNA
aaagtccacatgataacagagaa

SEQ ID NO: 228 - RNA, 24 nt, synthetic construct
  misc_feature 1..24: note = Synthetic
  source 1..24: mol_type = other RNA
aaagtccacatgataacagagaat

SEQ ID NO: 229 - RNA, 25 nt, synthetic construct
  misc_feature 1..25: note = Synthetic
  source 1..25: mol_type = other RNA
aaagtccacatgataacagagaata

SEQ ID NO: 230 - RNA, 20 nt, synthetic construct
  misc_feature 1..20: note = Synthetic
  source 1..20: mol_type = other RNA
aagtccacatgataacagag

SEQ ID NO: 231 - RNA, 21 nt, synthetic construct
  misc_feature 1..21: note = Synthetic
  source 1..21: mol_type = other RNA
aagtccacatgataacagaga

SEQ ID NO: 232 - RNA, 22 nt, synthetic construct
  misc_feature 1..22: note = Synthetic
  source 1..22: mol_type = other RNA
aagtccacatgataacagagaa

SEQ ID NO: 233 - RNA, 23 nt, synthetic construct
  misc_feature 1..23: note = Synthetic
  source 1..23: mol_type = other RNA
aagtccacatgataacagagaat

SEQ ID NO: 234 - RNA, 24 nt, synthetic construct
  misc_feature 1..24: note = Synthetic
  source 1..24: mol_type = other RNA
aagtccacatgataacagagaata

SEQ ID NO: 235 - RNA, 25 nt, synthetic construct
  misc_feature 1..25: note = Synthetic
  source 1..25: mol_type = other RNA
aagtccacatgataacagagaatat

SEQ ID NO: 236 - RNA, 21 nt, synthetic construct
  misc_feature 1..21: note = Synthetic
  source 1..21: mol_type = other RNA
agtccacatgataacagagaa

SEQ ID NO: 237 - RNA, 22 nt, synthetic construct
  misc_feature 1..22: note = Synthetic
  source 1..22: mol_type = other RNA
agtccacatgataacagagaat

SEQ ID NO: 238 - RNA, 23 nt, synthetic construct
  misc_feature 1..23: note = Synthetic
  source 1..23: mol_type = other RNA
agtccacatgataacagagaata

SEQ ID NO: 239 - RNA, 24 nt, synthetic construct
  misc_feature 1..24: note = Synthetic
  source 1..24: mol_type = other RNA
agtccacatgataacagagaatat

SEQ ID NO: 240 - RNA, 25 nt, synthetic construct
  misc_feature 1..25: note = Synthetic
  source 1..25: mol_type = other RNA
agtccacatgataacagagaatatc

SEQ ID NO: 241 - RNA, 24 nt, synthetic construct
  misc_feature 1..24: note = Synthetic
  source 1..24: mol_type = other RNA
gtccacatgataacagagaatatc

SEQ ID NO: 242 - RNA, 25 nt, synthetic construct
  misc_feature 1..25: note = Synthetic
  source 1..25: mol_type = other RNA
gtccacatgataacagagaatatca

SEQ ID NO: 243 - RNA, 25 nt, synthetic construct
  misc_feature 1..25: note = Synthetic
  source 1..25: mol_type = other RNA
ggaagaaactcatagattactgcaa

SEQ ID NO: 244 - RNA, 24 nt, synthetic construct
  misc_feature 1..24: note = Synthetic
  source 1..24: mol_type = other RNA
gctgaaacaactgccaatgtccta

SEQ ID NO: 245 - RNA, 25 nt, synthetic construct
  misc_feature 1..25: note = Synthetic
  source 1..25: mol_type = other RNA
gctgaaacaactgccaatgtcctac

SEQ ID NO: 246 - RNA, 23 nt, synthetic construct
  misc_feature 1..23: note = Synthetic
  source 1..23: mol_type = other RNA
tgaaacaactgccaatgtcctac

SEQ ID NO: 247 - RNA, 24 nt, synthetic construct
  misc_feature 1..24: note = Synthetic
  source 1..24: mol_type = other RNA
tgaaacaactgccaatgtcctaca

SEQ ID NO: 248 - RNA, 25 nt, synthetic construct
  misc_feature 1..25: note = Synthetic
  source 1..25: mol_type = other RNA
tgaaacaactgccaatgtcctacag

SEQ ID NO: 249 - RNA, 25 nt, synthetic construct
  misc_feature 1..25: note = Synthetic
  source 1..25: mol_type = other RNA
aacaactgccaatgtcctacaggat

SEQ ID NO: 250 - RNA, 24 nt, synthetic construct
  misc_feature 1..24: note = Synthetic
  source 1..24: mol_type = other RNA
acaactgccaatgtcctacaggat

SEQ ID NO: 251 - RNA, 23 nt, synthetic construct
  misc_feature 1..23: note = Synthetic
  source 1..23: mol_type = other RNA
caactgccaatgtcctacaggat

SEQ ID NO: 252 - RNA, 22 nt, synthetic construct
  misc_feature 1..22: note = Synthetic
  source 1..22: mol_type = other RNA
aactgccaatgtcctacaggat

SEQ ID NO: 253 - RNA, 25 nt, synthetic construct
  misc_feature 1..25: note = Synthetic
  source 1..25: mol_type = other RNA
aactgccaatgtcctacaggatgct

SEQ ID NO: 254 - RNA, 21 nt, synthetic construct
  misc_feature 1..21: note = Synthetic
  source 1..21: mol_type = other RNA
actgccaatgtcctacaggat

SEQ ID NO: 255 - RNA, 24 nt, synthetic construct
  misc_feature 1..24: note = Synthetic
  source 1..24: mol_type = other RNA
actgccaatgtcctacaggatgct

SEQ ID NO: 256 - RNA, 23 nt, synthetic construct
  misc_feature 1..23: note = Synthetic
  source 1..23: mol_type = other RNA
ctgccaatgtcctacaggatgct

SEQ ID NO: 257 - RNA, 22 nt, synthetic construct
  misc_feature 1..22: note = Synthetic
  source 1..22: mol_type = other RNA
tgccaatgtcctacaggatgct

SEQ ID NO: 258 - RNA, 21 nt, synthetic construct
  misc_feature 1..21: note = Synthetic
  source 1..21: mol_type = other RNA
gccaatgtcctacaggatgct

SEQ ID NO: 259 - RNA, 20 nt, synthetic construct
  misc_feature 1..20: note = Synthetic
  source 1..20: mol_type = other RNA
agatgataccagaaaagtcc

SEQ ID NO: 260 - RNA, 23 nt, synthetic construct
  misc_feature 1..23: note = Synthetic
  source 1..23: mol_type = other RNA
agatgataccagaaaagtccaca

SEQ ID NO: 261 - RNA, 24 nt, synthetic construct
  misc_feature 1..24: note = Synthetic
  source 1..24: mol_type = other RNA
agatgataccagaaaagtccacat

SEQ ID NO: 262 - RNA, 24 nt, synthetic construct
  misc_feature 1..24: note = Synthetic
  source 1..24: mol_type = other RNA
ctgaaacaactgccaatgtcctac

SEQ ID NO: 263 - RNA, 25 nt, synthetic construct
  misc_feature 1..25: note = Synthetic
  source 1..25: mol_type = other RNA
ctgaaacaactgccaatgtcctaca

SEQ ID NO: 264 - RNA, 25 nt, synthetic construct
  misc_feature 1..25: note = Synthetic
  source 1..25: mol_type = other RNA
acaactgccaatgtcctacaggatg

SEQ ID NO: 265 - RNA, 24 nt, synthetic construct
  misc_feature 1..24: note = Synthetic
  source 1..24: mol_type = other RNA
caactgccaatgtcctacaggatg

SEQ ID NO: 266 - RNA, 23 nt, synthetic construct
  misc_feature 1..23: note = Synthetic
  source 1..23: mol_type = other RNA
aactgccaatgtcctacaggatg

SEQ ID NO: 267 - RNA, 22 nt, synthetic construct
  misc_feature 1..22: note = Synthetic
  source 1..22: mol_type = other RNA
actgccaatgtcctacaggatg

SEQ ID NO: 268 - RNA, 25 nt, synthetic construct
  misc_feature 1..25: note = Synthetic
  source 1..25: mol_type = other RNA
actgccaatgtcctacaggatgcta

SEQ ID NO: 269 - RNA, 21 nt, synthetic construct
  misc_feature 1..21: note = Synthetic
  source 1..21: mol_type = other RNA
ctgccaatgtcctacaggatg

SEQ ID NO: 270 - RNA, 24 nt, synthetic construct
  misc_feature 1..24: note = Synthetic
  source 1..24: mol_type = other RNA
ctgccaatgtcctacaggatgcta

SEQ ID NO: 271 - RNA, 23 nt, synthetic construct
  misc_feature 1..23: note = Synthetic
  source 1..23: mol_type = other RNA
tgccaatgtcctacaggatgcta

SEQ ID NO: 272 - RNA, 25 nt, synthetic construct
  misc_feature 1..25: note = Synthetic
  source 1..25: mol_type = other RNA
tgccaatgtcctacaggatgctacc

SEQ ID NO: 273 - RNA, 22 nt, synthetic construct
  misc_feature 1..22: note = Synthetic
  source 1..22: mol_type = other RNA
gccaatgtcctacaggatgcta

SEQ ID NO: 274 - RNA, 24 nt, synthetic construct
  misc_feature 1..24: note = Synthetic
  source 1..24: mol_type = other RNA
gccaatgtcctacaggatgctacc

SEQ ID NO: 275 - RNA, 21 nt, synthetic construct
  misc_feature 1..21: note = Synthetic
  source 1..21: mol_type = other RNA
ccaagggagtaaaagagctga

SEQ ID NO: 276 - RNA, 22 nt, synthetic construct
  misc_feature 1..22: note = Synthetic
  source 1..22: mol_type = other RNA
ccaagggagtaaaagagctgat

SEQ ID NO: 277 - RNA, 23 nt, synthetic construct
  misc_feature 1..23: note = Synthetic
  source 1..23: mol_type = other RNA
ccaagggagtaaaagagctgatg

SEQ ID NO: 278 - RNA, 24 nt, synthetic construct
  misc_feature 1..24: note = Synthetic
  source 1..24: mol_type = other RNA
ccaagggagtaaaagagctgatga

SEQ ID NO: 279 - RNA, 23 nt, synthetic construct
  misc_feature 1..23: note = Synthetic
  source 1..23: mol_type = other RNA
caagggagtaaaagagctgatga

SEQ ID NO: 280 - RNA, 24 nt, synthetic construct
  misc_feature 1..24: note = Synthetic
  source 1..24: mol_type = other RNA
caagggagtaaaagagctgatgaa

SEQ ID NO: 281 - RNA, 23 nt, synthetic construct
  misc_feature 1..23: note = Synthetic
  source 1..23: mol_type = other RNA
agggagtaaaagagctgatgaaa

SEQ ID NO: 282 - RNA, 25 nt, synthetic construct
  misc_feature 1..25: note = Synthetic
  source 1..25: mol_type = other RNA
ctgatgaaacaatggcaagtaagtc

SEQ ID NO: 283 - RNA, 24 nt, synthetic construct
  misc_feature 1..24: note = Synthetic
  source 1..24: mol_type = other RNA
tgatgaaacaatggcaagtaagtc

SEQ ID NO: 284 - RNA, 23 nt, synthetic construct
  misc_feature 1..23: note = Synthetic
  source 1..23: mol_type = other RNA
gatgaaacaatggcaagtaagtc

SEQ ID NO: 285 - RNA, 21 nt, synthetic construct
  misc_feature 1..21: note = Synthetic
  source 1..21: mol_type = other RNA
cctggaaggttccgatgatgc

SEQ ID NO: 286 - RNA, 22 nt, synthetic construct
  misc_feature 1..22: note = Synthetic
  source 1..22: mol_type = other RNA
cctggaaggttccgatgatgca

SEQ ID NO: 287 - RNA, 24 nt, synthetic construct
  misc_feature 1..24: note = Synthetic
  source 1..24: mol_type = other RNA
cagatgataccagaaaagtccaca

SEQ ID NO: 288 - RNA, 25 nt, synthetic construct
  misc_feature 1..25: note = Synthetic
  source 1..25: mol_type = other RNA
cagatgataccagaaaagtccacat

SEQ ID NO: 289 - RNA, 25 nt, synthetic construct
  misc_feature 1..25: note = Synthetic
  source 1..25: mol_type = other RNA
ctgccaatgtcctacaggatgctac

SEQ ID NO: 290 - RNA, 24 nt, synthetic construct
  misc_feature 1..24: note = Synthetic
  source 1..24: mol_type = other RNA
tgccaatgtcctacaggatgctac

SEQ ID NO: 291 - RNA, 23 nt, synthetic construct
  misc_feature 1..23: note = Synthetic
  source 1..23: mol_type = other RNA
gccaatgtcctacaggatgctac

SEQ ID NO: 292 - RNA, 22 nt, synthetic construct
  misc_feature 1..22: note = Synthetic
  source 1..22: mol_type = other RNA
ccaatgtcctacaggatgctac

SEQ ID NO: 293 - RNA, 24 nt, synthetic construct
  misc_feature 1..24: note = Synthetic
  source 1..24: mol_type = other RNA
agggagtaaaagagctgatgaaac

SEQ ID NO: 294 - RNA, 25 nt, synthetic construct
  misc_feature 1..25: note = Synthetic
  source 1..25: mol_type = other RNA
tgatgaaacaatggcaagtaagtca

SEQ ID NO: 295 - RNA, 24 nt, synthetic construct
  misc_feature 1..24: note = Synthetic
  source 1..24: mol_type = other RNA
gatgaaacaatggcaagtaagtca

SEQ ID NO: 296 - RNA, 23 nt, synthetic construct
  misc_feature 1..23: note = Synthetic
  source 1..23: mol_type = other RNA
cctggaaggttccgatgatgcag

SEQ ID NO: 297 - RNA, 20 nt, synthetic construct
  misc_feature 1..20: note = Synthetic
  source 1..20: mol_type = other RNA
ggaaggttccgatgatgcag

SEQ ID NO: 298 - RNA, 24 nt, synthetic construct
  misc_feature 1..24: note = Synthetic
  source 1..24: mol_type = other RNA
gatccaattgaacaattctcagca

SEQ ID NO: 299 - RNA, 23 nt, synthetic construct
  misc_feature 1..23: note = Synthetic
  source 1..23: mol_type = other RNA
aggttccgatgatgcagtcctgt

SEQ ID NO: 300 - RNA, 22 nt, synthetic construct
  misc_feature 1..22: note = Synthetic
  source 1..22: mol_type = other RNA
ggttccgatgatgcagtcctgt

SEQ ID NO: 301 - RNA, 24 nt, synthetic construct
  misc_feature 1..24: note = Synthetic
  source 1..24: mol_type = other RNA
cctggaaggttccgatgatgcagt

SEQ ID NO: 302 - RNA, 23 nt, synthetic construct
  misc_feature 1..23: note = Synthetic
  source 1..23: mol_type = other RNA
ctggaaggttccgatgatgcagt

SEQ ID NO: 303 - RNA, 21 nt, synthetic construct
  misc_feature 1..21: note = Synthetic
  source 1..21: mol_type = other RNA
ggaaggttccgatgatgcagt

SEQ ID NO: 304 - RNA, 25 nt, synthetic construct
  misc_feature 1..25: note = Synthetic
  source 1..25: mol_type = other RNA
gaaggttccgatgatgcagtcctgt

SEQ ID NO: 305 - RNA, 25 nt, synthetic construct
  misc_feature 1..25: note = Synthetic
  source 1..25: mol_type = other RNA
ggttccgatgatgcagtcctgttac

SEQ ID NO: 306 - RNA, 24 nt, synthetic construct
  misc_feature 1..24: note = Synthetic
  source 1..24: mol_type = other RNA
gttccgatgatgcagtcctgttac

SEQ ID NO: 307 - RNA, 23 nt, synthetic construct
  misc_feature 1..23: note = Synthetic
  source 1..23: mol_type = other RNA
gtggatccaattgaacaattctc

SEQ ID NO: 308 - RNA, 25 nt, synthetic construct
  misc_feature 1..25: note = Synthetic
  source 1..25: mol_type = other RNA
ggatccaattgaacaattctcagca

SEQ ID NO: 309 - RNA, 25 nt, synthetic construct
  misc_feature 1..25: note = Synthetic
  source 1..25: mol_type = other RNA
gatccaattgaacaattctcagcat

SEQ ID NO: 310 - RNA, 24 nt, synthetic construct
  misc_feature 1..24: note = Synthetic
  source 1..24: mol_type = other RNA
aaggttccgatgatgcagtcctgt

SEQ ID NO: 311 - RNA, 20 nt, synthetic construct
  misc_feature 1..20: note = Synthetic
  source 1..20: mol_type = other RNA
aggttccgatgatgcagtcc

SEQ ID NO: 312 - RNA, 24 nt, synthetic construct
  misc_feature 1..24: note = Synthetic
  source 1..24: mol_type = other RNA
gtggatccaattgaacaattctca

SEQ ID NO: 313 - RNA, 25 nt, synthetic construct
  misc_feature 1..25: note = Synthetic
  source 1..25: mol_type = other RNA
aggttccgatgatgcagtcctgtta

SEQ ID NO: 314 - RNA, 24 nt, synthetic construct
  misc_feature 1..24: note = Synthetic
  source 1..24: mol_type = other RNA
ggttccgatgatgcagtcctgtta

SEQ ID NO: 315 - RNA, 25 nt, synthetic construct
  misc_feature 1..25: note = Synthetic
  source 1..25: mol_type = other RNA
ctggaaggttccgatgatgcagtcc

SEQ ID NO: 316 - RNA, 24 nt, synthetic construct
  misc_feature 1..24: note = Synthetic
  source 1..24: mol_type = other RNA
tggaaggttccgatgatgcagtcc

SEQ ID NO: 317 - RNA, 23 nt, synthetic construct
  misc_feature 1..23: note = Synthetic
  source 1..23: mol_type = other RNA
ggaaggttccgatgatgcagtcc

SEQ ID NO: 318 - RNA, 24 nt, synthetic construct
  misc_feature 1..24: note = Synthetic
  source 1..24: mol_type = other RNA
tgtggatccaattgaacaattctc

SEQ ID NO: 319 - RNA, 25 nt, synthetic construct
  misc_feature 1..25: note = Synthetic
  source 1..25: mol_type = other RNA
ttgtggatccaattgaacaattctc

SEQ ID NO: 320 - RNA, 25 nt, synthetic construct
  misc_feature 1..25: note = Synthetic
  source 1..25: mol_type = other RNA
tgtggatccaattgaacaattctca

SEQ ID NO: 321 - RNA, 21 nt, synthetic construct
  misc_feature 1..21: note = Synthetic
  source 1..21: mol_type = other RNA
gttccgatgatgcagtcctgt

SEQ ID NO: 322 - RNA, 21 nt, synthetic construct
  misc_feature 1..21: note = Synthetic
  source 1..21: mol_type = other RNA
tccgatgatgcagtcctgtta

SEQ ID NO: 323 - RNA, 22 nt, synthetic construct
  misc_feature 1..22: note = Synthetic
  source 1..22: mol_type = other RNA
tccgatgatgcagtcctgttac

SEQ ID NO: 324 - RNA, 23 nt, synthetic construct
  misc_feature 1..23: note = Synthetic
  source 1..23: mol_type = other RNA
gttccgatgatgcagtcctgtta

SEQ ID NO: 325 - RNA, 23 nt, synthetic construct
  misc_feature 1..23: note = Synthetic
  source 1..23: mol_type = other RNA
ttccgatgatgcagtcctgttac

SEQ ID NO: 326 - RNA, 24 nt, synthetic construct
  misc_feature 1..24: note = Synthetic
  source 1..24: mol_type = other RNA
ctccaaattcacattcatcgcttg

SEQ ID NO: 327 - RNA, 22 nt, synthetic construct
  misc_feature 1..22: note = Synthetic
  source 1..22: mol_type = other RNA
gaaggttccgatgatgcagtcc

SEQ ID NO: 328 - RNA, 21 nt, synthetic construct
  misc_feature 1..21: note = Synthetic
  source 1..21: mol_type = other RNA
aaggttccgatgatgcagtcc

SEQ ID NO: 329 - RNA, 24 nt, synthetic construct
  misc_feature 1..24: note = Synthetic
  source 1..24: mol_type = other RNA
ggagcttgggagggttcaagacga

SEQ ID NO: 330 - RNA, 25 nt, synthetic construct
  misc_feature 1..25: note = Synthetic
  source 1..25: mol_type = other RNA
ggagcttgggagggttcaagacgat

SEQ ID NO: 331 - RNA, 22 nt, synthetic construct
  misc_feature 1..22: note = Synthetic
  source 1..22: mol_type = other RNA
tggctgtaataatggggtggtg

SEQ ID NO: 332 - RNA, 23 nt, synthetic construct
  misc_feature 1..23: note = Synthetic
  source 1..23: mol_type = other RNA
tggctgtaataatggggtggtga

SEQ ID NO: 333 - RNA, 22 nt, synthetic construct
  misc_feature 1..22: note = Synthetic
  source 1..22: mol_type = other RNA
ggctgtaataatggggtggtga

SEQ ID NO: 334 - RNA, 20 nt, synthetic construct
  misc_feature 1..20: note = Synthetic
  source 1..20: mol_type = other RNA
ggggtggtgaaactggatgg

SEQ ID NO: 335 - RNA, 24 nt, synthetic construct
  misc_feature 1..24: note = Synthetic
  source 1..24: mol_type = other RNA
ttggctgtaataatggggtggtga

SEQ ID NO: 336 - RNA, 21 nt, synthetic construct
  misc_feature 1..21: note = Synthetic
  source 1..21: mol_type = other RNA
ggggtggtgaaactggatgga

SEQ ID NO: 337 - RNA, 21 nt, synthetic construct
  misc_feature 1..21: note = Synthetic
  source 1..21: mol_type = other RNA
gctgtaataatggggtggtga

SEQ ID NO: 338 - RNA, 21 nt, synthetic construct
  misc_feature 1..21: note = Synthetic
  source 1..21: mol_type = other RNA
tggggtggtgaaactggatgg

SEQ ID NO: 339 - RNA, 25 nt, synthetic construct
  misc_feature 1..25: note = Synthetic
  source 1..25: mol_type = other RNA
tggctgtaataatggggtggtgaaa

SEQ ID NO: 340 - RNA, 24 nt, synthetic construct
  misc_feature 1..24: note = Synthetic
  source 1..24: mol_type = other RNA
ggctgtaataatggggtggtgaaa

SEQ ID NO: 341 - RNA, 20 nt, synthetic construct
  misc_feature 1..20: note = Synthetic
  source 1..20: mol_type = other RNA
tggggtggtgaaactggatg

SEQ ID NO: 342 - RNA, 22 nt, synthetic construct
  misc_feature 1..22: note = Synthetic
  source 1..22: mol_type = other RNA
tggggtggtgaaactggatgga

SEQ ID NO: 343 - RNA, 24 nt, synthetic construct
  misc_feature 1..24: note = Synthetic
  source 1..24: mol_type = other RNA
atggcaagtaagtcaggcatttcc

SEQ ID NO: 344 - RNA, 25 nt, synthetic construct
  misc_feature 1..25: note = Synthetic
  source 1..25: mol_type = other RNA
gctgtaataatggggtggtgaaact

SEQ ID NO: 345 - RNA, 21 nt, synthetic construct
  misc_feature 1..21: note = Synthetic
  source 1..21: mol_type = other RNA
atggggtggtgaaactggatg

SEQ ID NO: 346 - RNA, 22 nt, synthetic construct
  misc_feature 1..22: note = Synthetic
  source 1..22: mol_type = other RNA
atggggtggtgaaactggatgg

SEQ ID NO: 347 - RNA, 23 nt, synthetic construct
  misc_feature 1..23: note = Synthetic
  source 1..23: mol_type = other RNA
gcaagtaagtcaggcatttccgc

SEQ ID NO: 348 - RNA, 25 nt, synthetic construct
  misc_feature 1..25: note = Synthetic
  source 1..25: mol_type = other RNA
ggctgtaataatggggtggtgaaac

SEQ ID NO: 349 - RNA, 22 nt, synthetic construct
  misc_feature 1..22: note = Synthetic
  source 1..22: mol_type = other RNA
aatggggtggtgaaactggatg

SEQ ID NO: 350 - RNA, 23 nt, synthetic construct
  misc_feature 1..23: note = Synthetic
  source 1..23: mol_type = other RNA
atggggtggtgaaactggatgga

SEQ ID NO: 351 - RNA, 25 nt, synthetic construct
  misc_feature 1..25: note = Synthetic
  source 1..25: mol_type = other RNA
tggcaagtaagtcaggcatttccgc

SEQ ID NO: 352 - RNA, 23 nt, synthetic construct
  misc_feature 1..23: note = Synthetic
  source 1..23: mol_type = other RNA
gctgtaataatggggtggtgaaa

SEQ ID NO: 353 - RNA, 23 nt, synthetic construct
  misc_feature 1..23: note = Synthetic
  source 1..23: mol_type = other RNA
taatggggtggtgaaactggatg

SEQ ID NO: 354 - RNA, 24 nt, synthetic construct
  misc_feature 1..24: note = Synthetic
  source 1..24: mol_type = other RNA
taatggggtggtgaaactggatgg

SEQ ID NO: 355 - RNA, 23 nt, synthetic construct
  misc_feature 1..23: note = Synthetic
  source 1..23: mol_type = other RNA
aatggggtggtgaaactggatgg

SEQ ID NO: 356 - RNA, 23 nt, synthetic construct
  misc_feature 1..23: note = Synthetic
  source 1..23: mol_type = other RNA
atggcaagtaagtcaggcatttc

SEQ ID NO: 357 - RNA, 24 nt, synthetic construct
  misc_feature 1..24: note = Synthetic
  source 1..24: mol_type = other RNA
ggcaagtaagtcaggcatttccgc

SEQ ID NO: 358 - RNA, 25 nt, synthetic construct
  misc_feature 1..25: note = Synthetic
  source 1..25: mol_type = other RNA
ggcaagtaagtcaggcatttccgct

SEQ ID NO: 359 - RNA, 24 nt, synthetic construct
  misc_feature 1..24: note = Synthetic
  source 1..24: mol_type = other RNA
aatggggtggtgaaactggatgga

SEQ ID NO: 360 - RNA, 20 nt, synthetic construct
  misc_feature 1..20: note = Synthetic
  source 1..20: mol_type = other RNA
gggtggtgaaactggatgga

SEQ ID NO: 361 - RNA, 24 nt, synthetic construct
  misc_feature 1..24: note = Synthetic
  source 1..24: mol_type = other RNA
ataatggggtggtgaaactggatg

SEQ ID NO: 362 - RNA, 25 nt, synthetic construct
  misc_feature 1..25: note = Synthetic
  source 1..25: mol_type = other RNA
ataatggggtggtgaaactggatgg

SEQ ID NO: 363 - RNA, 25 nt, synthetic construct
  misc_feature 1..25: note = Synthetic
  source 1..25: mol_type = other RNA
taatggggtggtgaaactggatgga

SEQ ID NO: 364 - RNA, 24 nt, synthetic construct
  misc_feature 1..24: note = Synthetic
  source 1..24: mol_type = other RNA
aatggcaagtaagtcaggcatttc

SEQ ID NO: 365 - RNA, 25 nt, synthetic construct
  misc_feature 1..25: note = Synthetic
  source 1..25: mol_type = other RNA
aataatggggtggtgaaactggatg

SEQ ID NO: 366 - RNA, 25 nt, synthetic construct
  misc_feature 1..25: note = Synthetic
  source 1..25: mol_type = other RNA
aatggcaagtaagtcaggcatttcc

SEQ ID NO: 367 - RNA, 23 nt, synthetic construct
  misc_feature 1..23: note = Synthetic
  source 1..23: mol_type = other RNA
tggcaagtaagtcaggcatttcc

SEQ ID NO: 368 - RNA, 21 nt, synthetic construct
  misc_feature 1..21: note = Synthetic
  source 1..21: mol_type = other RNA
ccgatgatgcagtcctgttac

SEQ ID NO: 369 - RNA, 24 nt, synthetic construct
  misc_feature 1..24: note = Synthetic
  source 1..24: mol_type = other RNA
tccaaattcacattcatcgcttgt

SEQ ID NO: 370 - RNA, 21 nt, synthetic construct
  misc_feature 1..21: note = Synthetic
  source 1..21: mol_type = other RNA
gtaataatggggtggtgaaac

SEQ ID NO: 371 - RNA, 24 nt, synthetic construct
  misc_feature 1..24: note = Synthetic
  source 1..24: mol_type = other RNA
gctgtaataatggggtggtgaaac

SEQ ID NO: 372 - RNA, 25 nt, synthetic construct
  misc_feature 1..25: note = Synthetic
  source 1..25: mol_type = other RNA
gctttggaagaaactcatagattac

SEQ ID NO: 373 - RNA, 25 nt, synthetic construct
  misc_feature 1..25: note = Synthetic
  source 1..25: mol_type = other RNA
ttggaagaaactcatagattactgc

SEQ ID NO: 374 - RNA, 24 nt, synthetic construct
  misc_feature 1..24: note = Synthetic
  source 1..24: mol_type = other RNA
tggaagaaactcatagattactgc

SEQ ID NO: 375 - RNA, 25 nt, synthetic construct
  misc_feature 1..25: note = Synthetic
  source 1..25: mol_type = other RNA
tggaagaaactcatagattactgca

SEQ ID NO: 376 - RNA, 23 nt, synthetic construct
  misc_feature 1..23: note = Synthetic
  source 1..23: mol_type = other RNA
ggaagaaactcatagattactgc

SEQ ID NO: 377 - RNA, 23 nt, synthetic construct
  misc_feature 1..23: note = Synthetic
  source 1..23: mol_type = other RNA
gaagaaactcatagattactgca

SEQ ID NO: 378 - RNA, 22 nt, synthetic construct
  misc_feature 1..22: note = Synthetic
  source 1..22: mol_type = other RNA
aaacaactgccaatgtcctaca

SEQ ID NO: 379 - RNA, 23 nt, synthetic construct
  misc_feature 1..23: note = Synthetic
  source 1..23: mol_type = other RNA
aaacaactgccaatgtcctacag

SEQ ID NO: 380 - RNA, 20 nt, synthetic construct
  misc_feature 1..20: note = Synthetic
  source 1..20: mol_type = other RNA
aacaactgccaatgtcctac

SEQ ID NO: 381 - RNA, 21 nt, synthetic construct
  misc_feature 1..21: note = Synthetic
  source 1..21: mol_type = other RNA
aacaactgccaatgtcctaca

SEQ ID NO: 382 - RNA, 20 nt, synthetic construct
  misc_feature 1..20: note = Synthetic
  source 1..20: mol_type = other RNA
caactgccaatgtcctacag

SEQ ID NO: 383 - RNA, 20 nt, synthetic construct
  misc_feature 1..20: note = Synthetic
  source 1..20: mol_type = other RNA
aactgccaatgtcctacagg

SEQ ID NO: 384 - RNA, 22 nt, synthetic construct
  misc_feature 1..22: note = Synthetic
  source 1..22: mol_type = other RNA
gatgaaaacagccaaaaaatcc

SEQ ID NO: 385 - RNA, 23 nt, synthetic construct
  misc_feature 1..23: note = Synthetic
  source 1..23: mol_type = other RNA
gatgaaaacagccaaaaaatcct

SEQ ID NO: 386 - RNA, 24 nt, synthetic construct
  misc_feature 1..24: note = Synthetic
  source 1..24: mol_type = other RNA
gatgaaaacagccaaaaaatcctg

SEQ ID NO: 387 - RNA, 25 nt, synthetic construct
  misc_feature 1..25: note = Synthetic
  source 1..25: mol_type = other RNA
gatgaaaacagccaaaaaatcctga

SEQ ID NO: 388 - RNA, 25 nt, synthetic construct
  misc_feature 1..25: note = Synthetic
  source 1..25: mol_type = other RNA
atgaaaacagccaaaaaatcctgag

SEQ ID NO: 389 - RNA, 24 nt, synthetic construct
  misc_feature 1..24: note = Synthetic
  source 1..24: mol_type = other RNA
tgaaaacagccaaaaaatcctgag

SEQ ID NO: 390 - RNA, 25 nt, synthetic construct
  misc_feature 1..25: note = Synthetic
  source 1..25: mol_type = other RNA
tgaaaacagccaaaaaatcctgaga

SEQ ID NO: 391 - RNA, 24 nt, synthetic construct
  misc_feature 1..24: note = Synthetic
  source 1..24: mol_type = other RNA
gaaaacagccaaaaaatcctgaga

SEQ ID NO: 392 - RNA, 25 nt, synthetic construct
  misc_feature 1..25: note = Synthetic
  source 1..25: mol_type = other RNA
gaaaacagccaaaaaatcctgagat

SEQ ID NO: 393 - RNA, 24 nt, synthetic construct
  misc_feature 1..24: note = Synthetic
  source 1..24: mol_type = other RNA
aaacagccaaaaaatcctgagatc

SEQ ID NO: 394 - RNA, 25 nt, synthetic construct
  misc_feature 1..25: note = Synthetic
  source 1..25: mol_type = other RNA
aaacagccaaaaaatcctgagatcc

SEQ ID NO: 395 - RNA, 24 nt, synthetic construct
  misc_feature 1..24: note = Synthetic
  source 1..24: mol_type = other RNA
aacagccaaaaaatcctgagatcc

SEQ ID NO: 396 - RNA, 25 nt, synthetic construct
  misc_feature 1..25: note = Synthetic
  source 1..25: mol_type = other RNA
aacagccaaaaaatcctgagatccc

SEQ ID NO: 397 - RNA, 21 nt, synthetic construct
  misc_feature 1..21: note = Synthetic
  source 1..21: mol_type = other RNA
cctgagatccctggaaggttc

SEQ ID NO: 398 - RNA, 25 nt, synthetic construct
  misc_feature 1..25: note = Synthetic
  source 1..25: mol_type = other RNA
gaagaaactcatagattactgcaac

SEQ ID NO: 399 - RNA, 24 nt, synthetic construct
  misc_feature 1..24: note = Synthetic
  source 1..24: mol_type = other RNA
aagaaactcatagattactgcaac

SEQ ID NO: 400 - RNA, 25 nt, synthetic construct
  misc_feature 1..25: note = Synthetic
  source 1..25: mol_type = other RNA
aagaaactcatagattactgcaaca

SEQ ID NO: 401 - RNA, 23 nt, synthetic construct
  misc_feature 1..23: note = Synthetic
  source 1..23: mol_type = other RNA
agaaactcatagattactgcaac

SEQ ID NO: 402 - RNA, 22 nt, synthetic construct
  misc_feature 1..22: note = Synthetic
  source 1..22: mol_type = other RNA
gaaactcatagattactgcaac

SEQ ID NO: 403 - RNA, 23 nt, synthetic construct
  misc_feature 1..23: note = Synthetic
  source 1..23: mol_type = other RNA
gaaactcatagattactgcaaca

SEQ ID NO: 404 - RNA, 23 nt, synthetic construct
  misc_feature 1..23: note = Synthetic
  source 1..23: mol_type = other RNA
aaactcatagattactgcaacag

SEQ ID NO: 405 - RNA, 20 nt, synthetic construct
  misc_feature 1..20: note = Synthetic
  source 1..20: mol_type = other RNA
aactcatagattactgcaac

SEQ ID NO: 406 - RNA, 21 nt, synthetic construct
  misc_feature 1..21: note = Synthetic
  source 1..21: mol_type = other RNA
aactcatagattactgcaaca

SEQ ID NO: 407 - RNA, 22 nt, synthetic construct
  misc_feature 1..22: note = Synthetic
  source 1..22: mol_type = other RNA
aactcatagattactgcaacag

SEQ ID NO: 408 - RNA, 20 nt, synthetic construct
  misc_feature 1..20: note = Synthetic
  source 1..20: mol_type = other RNA
actcatagattactgcaaca

SEQ ID NO: 409 - RNA, 21 nt, synthetic construct
  misc_feature 1..21: note = Synthetic
  source 1..21: mol_type = other RNA
actcatagattactgcaacag

SEQ ID NO: 410 - RNA, 20 nt, synthetic construct
  misc_feature 1..20: note = Synthetic
  source 1..20: mol_type = other RNA
gatgataccagaaaagtcca

SEQ ID NO: 411 - RNA, 21 nt, synthetic construct
  misc_feature 1..21: note = Synthetic
  source 1..21: mol_type = other RNA
gatgataccagaaaagtccac

SEQ ID NO: 412 - RNA, 22 nt, synthetic construct
  misc_feature 1..22: note = Synthetic
  source 1..22: mol_type = other RNA
gatgataccagaaaagtccaca

SEQ ID NO: 413 - RNA, 24 nt, synthetic construct
  misc_feature 1..24: note = Synthetic
  source 1..24: mol_type = other RNA
gatgataccagaaaagtccacatg

SEQ ID NO: 414 - RNA, 22 nt, synthetic construct
  misc_feature 1..22: note = Synthetic
  source 1..22: mol_type = other RNA
atgataccagaaaagtccacat

SEQ ID NO: 415 - RNA, 23 nt, synthetic construct
  misc_feature 1..23: note = Synthetic
  source 1..23: mol_type = other RNA
atgataccagaaaagtccacatg

SEQ ID NO: 416 - RNA, 20 nt, synthetic construct
  misc_feature 1..20: note = Synthetic
  source 1..20: mol_type = other RNA
tgataccagaaaagtccaca

SEQ ID NO: 417 - RNA, 21 nt, synthetic construct
  misc_feature 1..21: note = Synthetic
  source 1..21: mol_type = other RNA
tgataccagaaaagtccacat

SEQ ID NO: 418 - RNA, 22 nt, synthetic construct
  misc_feature 1..22: note = Synthetic
  source 1..22: mol_type = other RNA
tgataccagaaaagtccacatg

SEQ ID NO: 419 - RNA, 25 nt, synthetic construct
  misc_feature 1..25: note = Synthetic
  source 1..25: mol_type = other RNA
tgataccagaaaagtccacatgata

SEQ ID NO: 420 - RNA, 20 nt, synthetic construct
  misc_feature 1..20: note = Synthetic
  source 1..20: mol_type = other RNA
gataccagaaaagtccacat

SEQ ID NO: 421 - RNA, 21 nt, synthetic construct
  misc_feature 1..21: note = Synthetic
  source 1..21: mol_type = other RNA
gataccagaaaagtccacatg

SEQ ID NO: 422 - RNA, 24 nt, synthetic construct
  misc_feature 1..24: note = Synthetic
  source 1..24: mol_type = other RNA
gataccagaaaagtccacatgata

SEQ ID NO: 423 - RNA, 20 nt, synthetic construct
  misc_feature 1..20: note = Synthetic
  source 1..20: mol_type = other RNA
ataccagaaaagtccacatg

SEQ ID NO: 424 - RNA, 23 nt, synthetic construct
  misc_feature 1..23: note = Synthetic
  source 1..23: mol_type = other RNA
ataccagaaaagtccacatgata

SEQ ID NO: 425 - RNA, 24 nt, synthetic construct
  misc_feature 1..24: note = Synthetic
  source 1..24: mol_type = other RNA
ataccagaaaagtccacatgataa

SEQ ID NO: 426 - RNA, 22 nt, synthetic construct
  misc_feature 1..22: note = Synthetic
  source 1..22: mol_type = other RNA
taccagaaaagtccacatgata

SEQ ID NO: 427 - RNA, 21 nt, synthetic construct
  misc_feature 1..21: note = Synthetic
  source 1..21: mol_type = other RNA
accagaaaagtccacatgata

SEQ ID NO: 428 - RNA, 20 nt, synthetic construct
  misc_feature 1..20: note = Synthetic
  source 1..20: mol_type = other RNA
ccagaaaagtccacatgata

SEQ ID NO: 429 - RNA, 20 nt, synthetic construct
  misc_feature 1..20: note = Synthetic
  source 1..20: mol_type = other RNA
cagaaaagtccacatgataa

SEQ ID NO: 430 - RNA, 20 nt, synthetic construct
  misc_feature 1..20: note = Synthetic
  source 1..20: mol_type = other RNA
agaaaagtccacatgataac

SEQ ID NO: 431 - RNA, 21 nt, synthetic construct
  misc_feature 1..21: note = Synthetic
  source 1..21: mol_type = other RNA
agaaaagtccacatgataaca

SEQ ID NO: 432 - RNA, 22 nt, synthetic construct
  misc_feature 1..22: note = Synthetic
  source 1..22: mol_type = other RNA
agaaaagtccacatgataacag

SEQ ID NO: 433 - RNA, 20 nt, synthetic construct
  misc_feature 1..20: note = Synthetic
  source 1..20: mol_type = other RNA
gaaaagtccacatgataaca

SEQ ID NO: 434 - RNA, 21 nt, synthetic construct
  misc_feature 1..21: note = Synthetic
  source 1..21: mol_type = other RNA
aaaagtccacatgataacaga

SEQ ID NO: 435 - RNA, 20 nt, synthetic construct
  misc_feature 1..20: note = Synthetic
  source 1..20: mol_type = other RNA
aaagtccacatgataacaga

SEQ ID NO: 436 - RNA, 20 nt, synthetic construct
  misc_feature 1..20: note = Synthetic
  source 1..20: mol_type = other RNA
agtccacatgataacagaga

SEQ ID NO: 437 - RNA, 20 nt, synthetic construct
  misc_feature 1..20: note = Synthetic
  source 1..20: mol_type = other RNA
gtccacatgataacagagaa

SEQ ID NO: 438 - RNA, 21 nt, synthetic construct
  misc_feature 1..21: note = Synthetic
  source 1..21: mol_type = other RNA
gtccacatgataacagagaat

SEQ ID NO: 439 - RNA, 22 nt, synthetic construct
  misc_feature 1..22: note = Synthetic
  source 1..22: mol_type = other RNA
gtccacatgataacagagaata

SEQ ID NO: 440 - RNA, 23 nt, synthetic construct
  misc_feature 1..23: note = Synthetic
  source 1..23: mol_type = other RNA
gtccacatgataacagagaatat

SEQ ID NO: 441 - RNA, 20 nt, synthetic construct
  misc_feature 1..20: note = Synthetic
  source 1..20: mol_type = other RNA
ccacatgataacagagaata

SEQ ID NO: 442 - RNA, 24 nt, synthetic construct
  misc_feature 1..24: note = Synthetic
  source 1..24: mol_type = other RNA
gaagaaactcatagattactgcaa

SEQ ID NO: 443 - RNA, 25 nt, synthetic construct
  misc_feature 1..25: note = Synthetic
  source 1..25: mol_type = other RNA
gaagctgaaacaactgccaatgtcc

SEQ ID NO: 444 - RNA, 24 nt, synthetic construct
  misc_feature 1..24: note = Synthetic
  source 1..24: mol_type = other RNA
aagctgaaacaactgccaatgtcc

SEQ ID NO: 445 - RNA, 25 nt, synthetic construct
  misc_feature 1..25: note = Synthetic
  source 1..25: mol_type = other RNA
aagctgaaacaactgccaatgtcct

SEQ ID NO: 446 - RNA, 22 nt, synthetic construct
  misc_feature 1..22: note = Synthetic
  source 1..22: mol_type = other RNA
agctgaaacaactgccaatgtc

SEQ ID NO: 447 - RNA, 23 nt, synthetic construct
  misc_feature 1..23: note = Synthetic
  source 1..23: mol_type = other RNA
agctgaaacaactgccaatgtcc

SEQ ID NO: 448 - RNA, 24 nt, synthetic construct
  misc_feature 1..24: note = Synthetic
  source 1..24: mol_type = other RNA
agctgaaacaactgccaatgtcct

SEQ ID NO: 449 - RNA, 25 nt, synthetic construct
  misc_feature 1..25: note = Synthetic
  source 1..25: mol_type = other RNA
agctgaaacaactgccaatgtccta

SEQ ID NO: 450 - RNA, 21 nt, synthetic construct
  misc_feature 1..21: note = Synthetic
  source 1..21: mol_type = other RNA
gctgaaacaactgccaatgtc

SEQ ID NO: 451 - RNA, 22 nt, synthetic construct
  misc_feature 1..22: note = Synthetic
  source 1..22: mol_type = other RNA
gctgaaacaactgccaatgtcc

SEQ ID NO: 452 - RNA, 23 nt, synthetic construct
  misc_feature 1..23: note = Synthetic
  source 1..23: mol_type = other RNA
gctgaaacaactgccaatgtcct

SEQ ID NO: 453 - RNA, 25 nt, synthetic construct
  misc_feature 1..25: note = Synthetic
  source 1..25: mol_type = other RNA
caactgccaatgtcctacaggatgc

SEQ ID NO: 454 - RNA, 24 nt, synthetic construct
  misc_feature 1..24: note = Synthetic
  source 1..24: mol_type = other RNA
aactgccaatgtcctacaggatgc

SEQ ID NO: 455 - RNA, 23 nt, synthetic construct
  misc_feature 1..23: note = Synthetic
  source 1..23: mol_type = other RNA
actgccaatgtcctacaggatgc

SEQ ID NO: 456 - RNA, 20 nt, synthetic construct
  misc_feature 1..20: note = Synthetic
  source 1..20: mol_type = other RNA
ctgccaatgtcctacaggat

SEQ ID NO: 457 - RNA, 22 nt, synthetic construct
  misc_feature 1..22: note = Synthetic
  source 1..22: mol_type = other RNA
ctgccaatgtcctacaggatgc

SEQ ID NO: 458 - RNA, 21 nt, synthetic construct
  misc_feature 1..21: note = Synthetic
  source 1..21: mol_type = other RNA
tgccaatgtcctacaggatgc

SEQ ID NO: 459 - RNA, 20 nt, synthetic construct
  misc_feature 1..20: note = Synthetic
  source 1..20: mol_type = other RNA
gccaatgtcctacaggatgc

SEQ ID NO: 460 - RNA, 20 nt, synthetic construct
  misc_feature 1..20: note = Synthetic
  source 1..20: mol_type = other RNA
ccaatgtcctacaggatgct

SEQ ID NO: 461 - RNA, 23 nt, synthetic construct
  misc_feature 1..23: note = Synthetic
  source 1..23: mol_type = other RNA
agagctgatgaaacaatggcaag

SEQ ID NO: 462 - RNA, 24 nt, synthetic construct
  misc_feature 1..24: note = Synthetic
  source 1..24: mol_type = other RNA
agagctgatgaaacaatggcaagt

SEQ ID NO: 463 - RNA, 25 nt, synthetic construct
  misc_feature 1..25: note = Synthetic
  source 1..25: mol_type = other RNA
agagctgatgaaacaatggcaagta

SEQ ID NO: 464 - RNA, 23 nt, synthetic construct
  misc_feature 1..23: note = Synthetic
  source 1..23: mol_type = other RNA
gagctgatgaaacaatggcaagt

SEQ ID NO: 465 - RNA, 24 nt, synthetic construct
  misc_feature 1..24: note = Synthetic
  source 1..24: mol_type = other RNA
gagctgatgaaacaatggcaagta

SEQ ID NO: 466 - RNA, 25 nt, synthetic construct
  misc_feature 1..25: note = Synthetic
  source 1..25: mol_type = other RNA
gagctgatgaaacaatggcaagtaa

SEQ ID NO: 467 - RNA, 25 nt, synthetic construct
  misc_feature 1..25: note = Synthetic
  source 1..25: mol_type = other RNA
agctgatgaaacaatggcaagtaag

SEQ ID NO: 468 - RNA, 24 nt, synthetic construct
  misc_feature 1..24: note = Synthetic
  source 1..24: mol_type = other RNA
gctgatgaaacaatggcaagtaag

SEQ ID NO: 469 - RNA, 25 nt, synthetic construct
  misc_feature 1..25: note = Synthetic
  source 1..25: mol_type = other RNA
gctgatgaaacaatggcaagtaagt

SEQ ID NO: 470 - RNA, 24 nt, synthetic construct
  misc_feature 1..24: note = Synthetic
  source 1..24: mol_type = other RNA
ctgatgaaacaatggcaagtaagt

SEQ ID NO: 471 - RNA, 25 nt, synthetic construct
  misc_feature 1..25: note = Synthetic
  source 1..25: mol_type = other RNA
tatcacaacctggatgaaaacagcc

SEQ ID NO: 472 - RNA, 24 nt, synthetic construct
  misc_feature 1..24: note = Synthetic
  source 1..24: mol_type = other RNA
atcacaacctggatgaaaacagcc

SEQ ID NO: 473 - RNA, 25 nt, synthetic construct
  misc_feature 1..25: note = Synthetic
  source 1..25: mol_type = other RNA
atcacaacctggatgaaaacagcca

SEQ ID NO: 474 - RNA, 23 nt, synthetic construct
  misc_feature 1..23: note = Synthetic
  source 1..23: mol_type = other RNA
tcacaacctggatgaaaacagcc

SEQ ID NO: 475 - RNA, 24 nt, synthetic construct
  misc_feature 1..24: note = Synthetic
  source 1..24: mol_type = other RNA
tcacaacctggatgaaaacagcca

SEQ ID NO: 476 - RNA, 25 nt, synthetic construct
  misc_feature 1..25: note = Synthetic
  source 1..25: mol_type = other RNA
tcacaacctggatgaaaacagccaa

SEQ ID NO: 477 - RNA, 25 nt, synthetic construct
  misc_feature 1..25: note = Synthetic
  source 1..25: mol_type = other RNA
cacaacctggatgaaaacagccaaa

SEQ ID NO: 478 - RNA, 25 nt, synthetic construct
  misc_feature 1..25: note = Synthetic
  source 1..25: mol_type = other RNA
acaacctggatgaaaacagccaaaa

SEQ ID NO: 479 - RNA, 22 nt, synthetic construct
  misc_feature 1..22: note = Synthetic
  source 1..22: mol_type = other RNA
ggatgaaaacagccaaaaaatc

SEQ ID NO: 480 - RNA, 23 nt, synthetic construct
  misc_feature 1..23: note = Synthetic
  source 1..23: mol_type = other RNA
ggatgaaaacagccaaaaaatcc

SEQ ID NO: 481 - RNA, 24 nt, synthetic construct
  misc_feature 1..24: note = Synthetic
  source 1..24: mol_type = other RNA
ggatgaaaacagccaaaaaatcct

SEQ ID NO: 482 - RNA, 25 nt, synthetic construct
  misc_feature 1..25: note = Synthetic
  source 1..25: mol_type = other RNA
ggatgaaaacagccaaaaaatcctg

SEQ ID NO: 483 - RNA, 23 nt, synthetic construct
  misc_feature 1..23: note = Synthetic
  source 1..23: mol_type = other RNA
acagccaaaaaatcctgagatcc

SEQ ID NO: 484 - RNA, 24 nt, synthetic construct
  misc_feature 1..24: note = Synthetic
  source 1..24: mol_type = other RNA
acagccaaaaaatcctgagatccc

SEQ ID NO: 485 - RNA, 24 nt, synthetic construct
  misc_feature 1..24: note = Synthetic
  source 1..24: mol_type = other RNA
cctgagatccctggaaggttccga

SEQ ID NO: 486 - RNA, 25 nt, synthetic construct
  misc_feature 1..25: note = Synthetic
  source 1..25: mol_type = other RNA
cctgagatccctggaaggttccgat

SEQ ID NO: 487 - RNA, 23 nt, synthetic construct
  misc_feature 1..23: note = Synthetic
  source 1..23: mol_type = other RNA
ctgagatccctggaaggttccga

SEQ ID NO: 488 - RNA, 24 nt, synthetic construct
  misc_feature 1..24: note = Synthetic
  source 1..24: mol_type = other RNA
ctgagatccctggaaggttccgat

SEQ ID NO: 489 - RNA, 25 nt, synthetic construct
  misc_feature 1..25: note = Synthetic
  source 1..25: mol_type = other RNA
ctgagatccctggaaggttccgatg

SEQ ID NO: 490 - RNA, 22 nt, synthetic construct
  misc_feature 1..22: note = Synthetic
  source 1..22: mol_type = other RNA
tgagatccctggaaggttccga

SEQ ID NO: 491 - RNA, 23 nt, synthetic construct
  misc_feature 1..23: note = Synthetic
  source 1..23: mol_type = other RNA
tgagatccctggaaggttccgat

SEQ ID NO: 492 - RNA, 24 nt, synthetic construct
  misc_feature 1..24: note = Synthetic
  source 1..24: mol_type = other RNA
tgagatccctggaaggttccgatg

SEQ ID NO: 493 - RNA, 25 nt, synthetic construct
  misc_feature 1..25: note = Synthetic
  source 1..25: mol_type = other RNA
tgagatccctggaaggttccgatga

SEQ ID NO: 494 - RNA, 21 nt, synthetic construct
  misc_feature 1..21: note = Synthetic
  source 1..21: mol_type = other RNA
gagatccctggaaggttccga

SEQ ID NO: 495 - RNA, 22 nt, synthetic construct
  misc_feature 1..22: note = Synthetic
  source 1..22: mol_type = other RNA
gagatccctggaaggttccgat

SEQ ID NO: 496 - RNA, 23 nt, synthetic construct
  misc_feature 1..23: note = Synthetic
  source 1..23: mol_type = other RNA
gagatccctggaaggttccgatg

SEQ ID NO: 497 - RNA, 24 nt, synthetic construct
  misc_feature 1..24: note = Synthetic
  source 1..24: mol_type = other RNA
gagatccctggaaggttccgatga

SEQ ID NO: 498 - RNA, 22 nt, synthetic construct
  misc_feature 1..22: note = Synthetic
  source 1..22: mol_type = other RNA
agatccctggaaggttccgatg

SEQ ID NO: 499 - RNA, 23 nt, synthetic construct
  misc_feature 1..23: note = Synthetic
  source 1..23: mol_type = other RNA
agatccctggaaggttccgatga

SEQ ID NO: 500 - RNA, 20 nt, synthetic construct
  misc_feature 1..20: note = Synthetic
  source 1..20: mol_type = other RNA
gatccctggaaggttccgat

SEQ ID NO: 501 - RNA, 21 nt, synthetic construct
  misc_feature 1..21: note = Synthetic
  source 1..21: mol_type = other RNA
gatccctggaaggttccgatg

SEQ ID NO: 502 - RNA, 22 nt, synthetic construct
  misc_feature 1..22: note = Synthetic
  source 1..22: mol_type = other RNA
gatccctggaaggttccgatga

SEQ ID NO: 503 - RNA, 21 nt, synthetic construct
  misc_feature 1..21: note = Synthetic
  source 1..21: mol_type = other RNA
atccctggaaggttccgatga

SEQ ID NO: 504 - RNA, 20 nt, synthetic construct
  misc_feature 1..20: note = Synthetic
  source 1..20: mol_type = other RNA
tccctggaaggttccgatga

SEQ ID NO: 505 - RNA, 21 nt, synthetic construct
  misc_feature 1..21: note = Synthetic
  source 1..21: mol_type = other RNA
agatgataccagaaaagtcca

SEQ ID NO: 506 - RNA, 22 nt, synthetic construct
  misc_feature 1..22: note = Synthetic
  source 1..22: mol_type = other RNA
agatgataccagaaaagtccac

SEQ ID NO: 507 - RNA, 25 nt, synthetic construct
  misc_feature 1..25: note = Synthetic
  source 1..25: mol_type = other RNA
agatgataccagaaaagtccacatg

SEQ ID NO: 508 - RNA, 23 nt, synthetic construct
  misc_feature 1..23: note = Synthetic
  source 1..23: mol_type = other RNA
tccacatgataacagagaatatc

SEQ ID NO: 509 - RNA, 21 nt, synthetic construct
  misc_feature 1..21: note = Synthetic
  source 1..21: mol_type = other RNA
ctgaaacaactgccaatgtcc

SEQ ID NO: 510 - RNA, 22 nt, synthetic construct
  misc_feature 1..22: note = Synthetic
  source 1..22: mol_type = other RNA
ctgaaacaactgccaatgtcct

SEQ ID NO: 511 - RNA, 23 nt, synthetic construct
  misc_feature 1..23: note = Synthetic
  source 1..23: mol_type = other RNA
ctgaaacaactgccaatgtccta

SEQ ID NO: 512 - RNA, 20 nt, synthetic construct
  misc_feature 1..20: note = Synthetic
  source 1..20: mol_type = other RNA
tgccaatgtcctacaggatg

SEQ ID NO: 513 - RNA, 21 nt, synthetic construct
  misc_feature 1..21: note = Synthetic
  source 1..21: mol_type = other RNA
ccaatgtcctacaggatgcta

SEQ ID NO: 514 - RNA, 23 nt, synthetic construct
  misc_feature 1..23: note = Synthetic
  source 1..23: mol_type = other RNA
ccaatgtcctacaggatgctacc

SEQ ID NO: 515 - RNA, 24 nt, synthetic construct
  misc_feature 1..24: note = Synthetic
  source 1..24: mol_type = other RNA
ctccaagggagtaaaagagctgat

SEQ ID NO: 516 - RNA, 22 nt, synthetic construct
  misc_feature 1..22: note = Synthetic
  source 1..22: mol_type = other RNA
tccaagggagtaaaagagctga

SEQ ID NO: 517 - RNA, 23 nt, synthetic construct
  misc_feature 1..23: note = Synthetic
  source 1..23: mol_type = other RNA
tccaagggagtaaaagagctgat

SEQ ID NO: 518 - RNA, 20 nt, synthetic construct
  misc_feature 1..20: note = Synthetic
  source 1..20: mol_type = other RNA
ccaagggagtaaaagagctg

SEQ ID NO: 519 - RNA, 25 nt, synthetic construct
  misc_feature 1..25: note = Synthetic
  source 1..25: mol_type = other RNA
ccaagggagtaaaagagctgatgaa

SEQ ID NO: 520 - RNA, 22 nt, synthetic construct
  misc_feature 1..22: note = Synthetic
  source 1..22: mol_type = other RNA
caagggagtaaaagagctgatg

SEQ ID NO: 521 - RNA, 25 nt, synthetic construct
  misc_feature 1..25: note = Synthetic
  source 1..25: mol_type = other RNA
caagggagtaaaagagctgatgaaa

SEQ ID NO: 522 - RNA, 21 nt, synthetic construct
  misc_feature 1..21: note = Synthetic
  source 1..21: mol_type = other RNA
agggagtaaaagagctgatga

SEQ ID NO: 523 - RNA, 22 nt, synthetic construct
  misc_feature 1..22: note = Synthetic
  source 1..22: mol_type = other RNA
agggagtaaaagagctgatgaa

SEQ ID NO: 524 - RNA, 23 nt, synthetic construct
  misc_feature 1..23: note = Synthetic
  source 1..23: mol_type = other RNA
aagagctgatgaaacaatggcaa

SEQ ID NO: 525 - RNA, 24 nt, synthetic construct
  misc_feature 1..24: note = Synthetic
  source 1..24: mol_type = other RNA
aagagctgatgaaacaatggcaag

SEQ ID NO: 526 - RNA, 25 nt, synthetic construct
  misc_feature 1..25: note = Synthetic
  source 1..25: mol_type = other RNA
aagagctgatgaaacaatggcaagt

SEQ ID NO: 527 - RNA, 22 nt, synthetic construct
  misc_feature 1..22: note = Synthetic
  source 1..22: mol_type = other RNA
atgaaacaatggcaagtaagtc

SEQ ID NO: 528 - RNA, 25 nt, synthetic construct
  misc_feature 1..25: note = Synthetic
  source 1..25: mol_type = other RNA
tccaaggtgaaattgaagctcacac

SEQ ID NO: 529 - RNA, 24 nt, synthetic construct
  misc_feature 1..24: note = Synthetic
  source 1..24: mol_type = other RNA
ccaaggtgaaattgaagctcacac

SEQ ID NO: 530 - RNA, 25 nt, synthetic construct
  misc_feature 1..25: note = Synthetic
  source 1..25: mol_type = other RNA
ccaaggtgaaattgaagctcacaca

SEQ ID NO: 531 - RNA, 25 nt, synthetic construct
  misc_feature 1..25: note = Synthetic
  source 1..25: mol_type = other RNA
caaggtgaaattgaagctcacacag

SEQ ID NO: 532 - RNA, 25 nt, synthetic construct
  misc_feature 1..25: note = Synthetic
  source 1..25: mol_type = other RNA
aaggtgaaattgaagctcacacaga

SEQ ID NO: 533 - RNA, 24 nt, synthetic construct
  misc_feature 1..24: note = Synthetic
  source 1..24: mol_type = other RNA
aggtgaaattgaagctcacacaga

SEQ ID NO: 534 - RNA, 25 nt, synthetic construct
  misc_feature 1..25: note = Synthetic
  source 1..25: mol_type = other RNA
aggtgaaattgaagctcacacagat

SEQ ID NO: 535 - RNA, 25 nt, synthetic construct
  misc_feature 1..25: note = Synthetic
  source 1..25: mol_type = other RNA
ttatcacaacctggatgaaaacagc

SEQ ID NO: 536 - RNA, 24 nt, synthetic construct
  misc_feature 1..24: note = Synthetic
  source 1..24: mol_type = other RNA
tggatgaaaacagccaaaaaatcc

SEQ ID NO: 537 - RNA, 25 nt, synthetic construct
  misc_feature 1..25: note = Synthetic
  source 1..25: mol_type = other RNA
tggatgaaaacagccaaaaaatcct

SEQ ID NO: 538 - RNA, 23 nt, synthetic construct
  misc_feature 1..23: note = Synthetic
  source 1..23: mol_type = other RNA
cctgagatccctggaaggttccg

SEQ ID NO: 539 - RNA, 22 nt, synthetic construct
  misc_feature 1..22: note = Synthetic
  source 1..22: mol_type = other RNA
ctgagatccctggaaggttccg

SEQ ID NO: 540 - RNA, 25 nt, synthetic construct
  misc_feature 1..25: note = Synthetic
  source 1..25: mol_type = other RNA
gagatccctggaaggttccgatgat

SEQ ID NO: 541 - RNA, 24 nt, synthetic construct
  misc_feature 1..24: note = Synthetic
  source 1..24: mol_type = other RNA
agatccctggaaggttccgatgat

SEQ ID NO: 542 - RNA, 23 nt, synthetic construct
  misc_feature 1..23: note = Synthetic
  source 1..23: mol_type = other RNA
gatccctggaaggttccgatgat

SEQ ID NO: 543 - RNA, 25 nt, synthetic construct
  misc_feature 1..25: note = Synthetic
  source 1..25: mol_type = other RNA
gatccctggaaggttccgatgatgc

SEQ ID NO: 544 - RNA, 22 nt, synthetic construct
  misc_feature 1..22: note = Synthetic
  source 1..22: mol_type = other RNA
atccctggaaggttccgatgat

SEQ ID NO: 545 - RNA, 24 nt, synthetic construct
  misc_feature 1..24: note = Synthetic
  source 1..24: mol_type = other RNA
atccctggaaggttccgatgatgc

SEQ ID NO: 546 - RNA, 25 nt, synthetic construct
  misc_feature 1..25: note = Synthetic
  source 1..25: mol_type = other RNA
atccctggaaggttccgatgatgca

SEQ ID NO: 547 - RNA, 21 nt, synthetic construct
  misc_feature 1..21: note = Synthetic
  source 1..21: mol_type = other RNA
tccctggaaggttccgatgat

SEQ ID NO: 548 - RNA, 23 nt, synthetic construct
  misc_feature 1..23: note = Synthetic
  source 1..23: mol_type = other RNA
tccctggaaggttccgatgatgc

SEQ ID NO: 549 - RNA, 24 nt, synthetic construct
  misc_feature 1..24: note = Synthetic
  source 1..24: mol_type = other RNA
tccctggaaggttccgatgatgca

SEQ ID NO: 550 - RNA, 22 nt, synthetic construct
  misc_feature 1..22: note = Synthetic
  source 1..22: mol_type = other RNA
ccctggaaggttccgatgatgc

SEQ ID NO: 551 - RNA, 23 nt, synthetic construct
  misc_feature 1..23: note = Synthetic
  source 1..23: mol_type = other RNA
ccctggaaggttccgatgatgca

SEQ ID NO: 552 - RNA, 20 nt, synthetic construct
  misc_feature 1..20: note = Synthetic
  source 1..20: mol_type = other RNA
ctggaaggttccgatgatgc

SEQ ID NO: 553 - RNA, 21 nt, synthetic construct
  misc_feature 1..21: note = Synthetic
  source 1..21: mol_type = other RNA
ctggaaggttccgatgatgca

SEQ ID NO: 554 - RNA, 20 nt, synthetic construct
  misc_feature 1..20: note = Synthetic
  source 1..20: mol_type = other RNA
tggaaggttccgatgatgca

SEQ ID NO: 555 - RNA, 25 nt, synthetic construct
  misc_feature 1..25: note = Synthetic
  source 1..25: mol_type = other RNA
ggcttacagaagctgaaacaactgc

SEQ ID NO: 556 - RNA, 22 nt, synthetic construct
  misc_feature 1..22: note = Synthetic
  source 1..22: mol_type = other RNA
gggagtaaaagagctgatgaaa

SEQ ID NO: 557 - RNA, 23 nt, synthetic construct
  misc_feature 1..23: note = Synthetic
  source 1..23: mol_type = other RNA
gggagtaaaagagctgatgaaac

SEQ ID NO: 558 - RNA, 25 nt, synthetic construct
  misc_feature 1..25: note = Synthetic
  source 1..25: mol_type = other RNA
aaaagagctgatgaaacaatggcaa

SEQ ID NO: 559 - RNA, 21 nt, synthetic construct
  misc_feature 1..21: note = Synthetic
  source 1..21: mol_type = other RNA
aggttccgatgatgcagtcct

SEQ ID NO: 560 - RNA, 22 nt, synthetic construct
  misc_feature 1..22: note = Synthetic
  source 1..22: mol_type = other RNA
aggttccgatgatgcagtcctg

SEQ ID NO: 561 - RNA, 20 nt, synthetic construct
  misc_feature 1..20: note = Synthetic
  source 1..20: mol_type = other RNA
ggttccgatgatgcagtcct

SEQ ID NO: 562 - RNA, 21 nt, synthetic construct
  misc_feature 1..21: note = Synthetic
  source 1..21: mol_type = other RNA
ggttccgatgatgcagtcctg

SEQ ID NO: 563 - RNA, 21 nt, synthetic construct
  misc_feature 1..21: note = Synthetic
  source 1..21: mol_type = other RNA
cagatgataccagaaaagtcc

SEQ ID NO: 564 - RNA, 22 nt, synthetic construct
  misc_feature 1..22: note = Synthetic
  source 1..22: mol_type = other RNA
cagatgataccagaaaagtcca

SEQ ID NO: 565 - RNA, 23 nt, synthetic construct
  misc_feature 1..23: note = Synthetic
  source 1..23: mol_type = other RNA
cagatgataccagaaaagtccac

SEQ ID NO: 566 - RNA, 21 nt, synthetic construct
  misc_feature 1..21: note = Synthetic
  source 1..21: mol_type = other RNA
caatgtcctacaggatgctac

SEQ ID NO: 567 - RNA, 22 nt, synthetic construct
  misc_feature 1..22: note = Synthetic
  source 1..22: mol_type = other RNA
aagggagtaaaagagctgatga

SEQ ID NO: 568 - RNA, 23 nt, synthetic construct
  misc_feature 1..23: note = Synthetic
  source 1..23: mol_type = other RNA
aagggagtaaaagagctgatgaa

SEQ ID NO: 569 - RNA, 24 nt, synthetic construct
  misc_feature 1..24: note = Synthetic
  source 1..24: mol_type = other RNA
aagggagtaaaagagctgatgaaa

SEQ ID NO: 570 - RNA, 25 nt, synthetic construct
  misc_feature 1..25: note = Synthetic
  source 1..25: mol_type = other RNA
aagggagtaaaagagctgatgaaac

SEQ ID NO: 571 - RNA, 23 nt, synthetic construct
  misc_feature 1..23: note = Synthetic
  source 1..23: mol_type = other RNA
aaagagctgatgaaacaatggca

SEQ ID NO: 572 - RNA, 24 nt, synthetic construct
  misc_feature 1..24: note = Synthetic
  source 1..24: mol_type = other RNA
aaagagctgatgaaacaatggcaa

SEQ ID NO: 573 - RNA, 25 nt, synthetic construct
  misc_feature 1..25: note = Synthetic
  source 1..25: mol_type = other RNA
aaagagctgatgaaacaatggcaag

SEQ ID NO: 574 - RNA, 23 nt, synthetic construct
  misc_feature 1..23: note = Synthetic
  source 1..23: mol_type = other RNA
atgaaacaatggcaagtaagtca

SEQ ID NO: 575 - RNA, 24 nt, synthetic construct
  misc_feature 1..24: note = Synthetic
  source 1..24: mol_type = other RNA
ccagggacaaaacaaaatagttgc

SEQ ID NO: 576 - RNA, 22 nt, synthetic construct
  misc_feature 1..22: note = Synthetic
  source 1..22: mol_type = other RNA
gcaattctccaaattcacattc

SEQ ID NO: 577 - RNA, 22 nt, synthetic construct
  misc_feature 1..22: note = Synthetic
  source 1..22: mol_type = other RNA
caattctccaaattcacattca

SEQ ID NO: 578 - RNA, 22 nt, synthetic construct
  misc_feature 1..22: note = Synthetic
  source 1..22: mol_type = other RNA
attctccaaattcacattcatc

SEQ ID NO: 579 - RNA, 25 nt, synthetic construct
  misc_feature 1..25: note = Synthetic
  source 1..25: mol_type = other RNA
ggtgaaattgaagctcacacagatg

SEQ ID NO: 580 - RNA, 25 nt, synthetic construct
  misc_feature 1..25: note = Synthetic
  source 1..25: mol_type = other RNA
ctcacacagatgtttatcacaacct

SEQ ID NO: 581 - RNA, 21 nt, synthetic construct
  misc_feature 1..21: note = Synthetic
  source 1..21: mol_type = other RNA
acaacctggatgaaaacagcc

SEQ ID NO: 582 - RNA, 22 nt, synthetic construct
  misc_feature 1..22: note = Synthetic
  source 1..22: mol_type = other RNA
acaacctggatgaaaacagcca

SEQ ID NO: 583 - RNA, 23 nt, synthetic construct
  misc_feature 1..23: note = Synthetic
  source 1..23: mol_type = other RNA
acaacctggatgaaaacagccaa

SEQ ID NO: 584 - RNA, 25 nt, synthetic construct
  misc_feature 1..25: note = Synthetic
  source 1..25: mol_type = other RNA
ctggatgaaaacagccaaaaaatcc

SEQ ID NO: 585 - RNA, 25 nt, synthetic construct
  misc_feature 1..25: note = Synthetic
  source 1..25: mol_type = other RNA
agatccctggaaggttccgatgatg

SEQ ID NO: 586 - RNA, 24 nt, synthetic construct
  misc_feature 1..24: note = Synthetic
  source 1..24: mol_type = other RNA
gatccctggaaggttccgatgatg

SEQ ID NO: 587 - RNA, 23 nt, synthetic construct
  misc_feature 1..23: note = Synthetic
  source 1..23: mol_type = other RNA
atccctggaaggttccgatgatg

SEQ ID NO: 588 - RNA, 22 nt, synthetic construct
  misc_feature 1..22: note = Synthetic
  source 1..22: mol_type = other RNA
tccctggaaggttccgatgatg

SEQ ID NO: 589 - RNA, 25 nt, synthetic construct
  misc_feature 1..25: note = Synthetic
  source 1..25: mol_type = other RNA
tccctggaaggttccgatgatgcag

SEQ ID NO: 590 - RNA, 21 nt, synthetic construct
  misc_feature 1..21: note = Synthetic
  source 1..21: mol_type = other RNA
ccctggaaggttccgatgatg

SEQ ID NO: 591 - RNA, 24 nt, synthetic construct
  misc_feature 1..24: note = Synthetic
  source 1..24: mol_type = other RNA
ccctggaaggttccgatgatgcag

SEQ ID NO: 592 - RNA, 22 nt, synthetic construct
  misc_feature 1..22: note = Synthetic
  source 1..22: mol_type = other RNA
ctggaaggttccgatgatgcag

SEQ ID NO: 593 - RNA, 21 nt, synthetic construct
  misc_feature 1..21: note = Synthetic
  source 1..21: mol_type = other RNA
tggaaggttccgatgatgcag

SEQ ID NO: 594 - RNA, 25 nt, synthetic construct
  misc_feature 1..25: note = Synthetic
  source 1..25: mol_type = other RNA
gatgatgcagtcctgttacaaagac

SEQ ID NO: 595 - RNA, 25 nt, synthetic construct
  misc_feature 1..25: note = Synthetic
  source 1..25: mol_type = other RNA
gcttacagaagctgaaacaactgcc

SEQ ID NO: 596 - RNA, 24 nt, synthetic construct
  misc_feature 1..24: note = Synthetic
  source 1..24: mol_type = other RNA
gggagtaaaagagctgatgaaaca

SEQ ID NO: 597 - RNA, 25 nt, synthetic construct
  misc_feature 1..25: note = Synthetic
  source 1..25: mol_type = other RNA
gagtaaaagagctgatgaaacaatg

SEQ ID NO: 598 - RNA, 24 nt, synthetic construct
  misc_feature 1..24: note = Synthetic
  source 1..24: mol_type = other RNA
taaaagagctgatgaaacaatggc

SEQ ID NO: 599 - RNA, 23 nt, synthetic construct
  misc_feature 1..23: note = Synthetic
  source 1..23: mol_type = other RNA
gatccaattgaacaattctcagc

SEQ ID NO: 600 - RNA, 23 nt, synthetic construct
  misc_feature 1..23: note = Synthetic
  source 1..23: mol_type = other RNA
aaggttccgatgatgcagtcctg

SEQ ID NO: 601 - RNA, 20 nt, synthetic construct
  misc_feature 1..20: note = Synthetic
  source 1..20: mol_type = other RNA
caagggagtaaaagagctga

SEQ ID NO: 602 - RNA, 25 nt, synthetic construct
  misc_feature 1..25: note = Synthetic
  source 1..25: mol_type = other RNA
agggagtaaaagagctgatgaaaca

SEQ ID NO: 603 - RNA, 25 nt, synthetic construct
  misc_feature 1..25: note = Synthetic
  source 1..25: mol_type = other RNA
gccagggacaaaacaaaatagttgc

SEQ ID NO: 604 - RNA, 23 nt, synthetic construct
  misc_feature 1..23: note = Synthetic
  source 1..23: mol_type = other RNA
tgcaattctccaaattcacattc

SEQ ID NO: 605 - RNA, 23 nt, synthetic construct
  misc_feature 1..23: note = Synthetic
  source 1..23: mol_type = other RNA
gcaattctccaaattcacattca

SEQ ID NO: 606 - RNA, 23 nt, synthetic construct
  misc_feature 1..23: note = Synthetic
  source 1..23: mol_type = other RNA
aattctccaaattcacattcatc

SEQ ID NO: 607 - RNA, 23 nt, synthetic construct
  misc_feature 1..23: note = Synthetic
  source 1..23: mol_type = other RNA
attctccaaattcacattcatcg

SEQ ID NO: 608 - RNA, 22 nt, synthetic construct
  misc_feature 1..22: note = Synthetic
  source 1..22: mol_type = other RNA
ttctccaaattcacattcatcg

SEQ ID NO: 609 - RNA, 21 nt, synthetic construct
  misc_feature 1..21: note = Synthetic
  source 1..21: mol_type = other RNA
tctccaaattcacattcatcg

SEQ ID NO: 610 - RNA, 25 nt, synthetic construct
  misc_feature 1..25: note = Synthetic
  source 1..25: mol_type = other RNA
ggtaattctgcacatattcttcttc

SEQ ID NO: 611 - RNA, 25 nt, synthetic construct
  misc_feature 1..25: note = Synthetic
  source 1..25: mol_type = other RNA
gctcacacagatgtttatcacaacc

SEQ ID NO: 612 - RNA, 21 nt, synthetic construct
  misc_feature 1..21: note = Synthetic
  source 1..21: mol_type = other RNA
tcacaacctggatgaaaacag

SEQ ID NO: 613 - RNA, 22 nt, synthetic construct
  misc_feature 1..22: note = Synthetic
  source 1..22: mol_type = other RNA
cacaacctggatgaaaacagcc

SEQ ID NO: 614 - RNA, 23 nt, synthetic construct
  misc_feature 1..23: note = Synthetic
  source 1..23: mol_type = other RNA
cacaacctggatgaaaacagcca

SEQ ID NO: 615 - RNA, 24 nt, synthetic construct
  misc_feature 1..24: note = Synthetic
  source 1..24: mol_type = other RNA
cacaacctggatgaaaacagccaa

SEQ ID NO: 616 - RNA, 24 nt, synthetic construct
  misc_feature 1..24: note = Synthetic
  source 1..24: mol_type = other RNA
acaacctggatgaaaacagccaaa

SEQ ID NO: 617 - RNA, 25 nt, synthetic construct
  misc_feature 1..25: note = Synthetic
  source 1..25: mol_type = other RNA
cctggatgaaaacagccaaaaaatc

SEQ ID NO: 618 - RNA, 25 nt, synthetic construct
  misc_feature 1..25: note = Synthetic
  source 1..25: mol_type = other RNA
ccctggaaggttccgatgatgcagt

SEQ ID NO: 619 - RNA, 22 nt, synthetic construct
  misc_feature 1..22: note = Synthetic
  source 1..22: mol_type = other RNA
tggaaggttccgatgatgcagt

SEQ ID NO: 620 - RNA, 25 nt, synthetic construct
  misc_feature 1..25: note = Synthetic
  source 1..25: mol_type = other RNA
tggaaggttccgatgatgcagtcct

SEQ ID NO: 621 - RNA, 24 nt, synthetic construct
  misc_feature 1..24: note = Synthetic
  source 1..24: mol_type = other RNA
ggaaggttccgatgatgcagtcct

SEQ ID NO: 622 - RNA, 25 nt, synthetic construct
  misc_feature 1..25: note = Synthetic
  source 1..25: mol_type = other RNA
ggaaggttccgatgatgcagtcctg

SEQ ID NO: 623 - RNA, 20 nt, synthetic construct
  misc_feature 1..20: note = Synthetic
  source 1..20: mol_type = other RNA
gaaggttccgatgatgcagt

SEQ ID NO: 624 - RNA, 25 nt, synthetic construct
  misc_feature 1..25: note = Synthetic
  source 1..25: mol_type = other RNA
gttccgatgatgcagtcctgttaca

SEQ ID NO: 625 - RNA, 25 nt, synthetic construct
  misc_feature 1..25: note = Synthetic
  source 1..25: mol_type = other RNA
gggagtaaaagagctgatgaaacaa

SEQ ID NO: 626 - RNA, 24 nt, synthetic construct
  misc_feature 1..24: note = Synthetic
  source 1..24: mol_type = other RNA
ggatccaattgaacaattctcagc

SEQ ID NO: 627 - RNA, 24 nt, synthetic construct
  misc_feature 1..24: note = Synthetic
  source 1..24: mol_type = other RNA
gaaggttccgatgatgcagtcctg

SEQ ID NO: 628 - RNA, 24 nt, synthetic construct
  misc_feature 1..24: note = Synthetic
  source 1..24: mol_type = other RNA
aggttccgatgatgcagtcctgtt

SEQ ID NO: 629 - RNA, 23 nt, synthetic construct
  misc_feature 1..23: note = Synthetic
  source 1..23: mol_type = other RNA
ggttccgatgatgcagtcctgtt

SEQ ID NO: 630 - RNA, 21 nt, synthetic construct
  misc_feature 1..21: note = Synthetic
  source 1..21: mol_type = other RNA
caagggagtaaaagagctgat

SEQ ID NO: 631 - RNA, 25 nt, synthetic construct
  misc_feature 1..25: note = Synthetic
  source 1..25: mol_type = other RNA
agcactcttgtggatccaattgaac

SEQ ID NO: 632 - RNA, 21 nt, synthetic construct
  misc_feature 1..21: note = Synthetic
  source 1..21: mol_type = other RNA
gccagggacaaaacaaaatag

SEQ ID NO: 633 - RNA, 24 nt, synthetic construct
  misc_feature 1..24: note = Synthetic
  source 1..24: mol_type = other RNA
ttgcaattctccaaattcacattc

SEQ ID NO: 634 - RNA, 24 nt, synthetic construct
  misc_feature 1..24: note = Synthetic
  source 1..24: mol_type = other RNA
tgcaattctccaaattcacattca

SEQ ID NO: 635 - RNA, 24 nt, synthetic construct
  misc_feature 1..24: note = Synthetic
  source 1..24: mol_type = other RNA
gcaattctccaaattcacattcat

SEQ ID NO: 636 - RNA, 24 nt, synthetic construct
  misc_feature 1..24: note = Synthetic
  source 1..24: mol_type = other RNA
caattctccaaattcacattcatc

SEQ ID NO: 637 - RNA, 24 nt, synthetic construct
  misc_feature 1..24: note = Synthetic
  source 1..24: mol_type = other RNA
aattctccaaattcacattcatcg

SEQ ID NO: 638 - RNA, 24 nt, synthetic construct
  misc_feature 1..24: note = Synthetic
  source 1..24: mol_type = other RNA
attctccaaattcacattcatcgc

SEQ ID NO: 639 - RNA, 23 nt, synthetic construct
  misc_feature 1..23: note = Synthetic
  source 1..23: mol_type = other RNA
ttctccaaattcacattcatcgc

SEQ ID NO: 640 - RNA, 22 nt, synthetic construct
  misc_feature 1..22: note = Synthetic
  source 1..22: mol_type = other RNA
tctccaaattcacattcatcgc

SEQ ID NO: 641 - RNA, 25 nt, synthetic construct
  misc_feature 1..25: note = Synthetic
  source 1..25: mol_type = other RNA
gtgaaattgaagctcacacagatgt

SEQ ID NO: 642 - RNA, 23 nt, synthetic construct
  misc_feature 1..23: note = Synthetic
  source 1..23: mol_type = other RNA
tatcacaacctggatgaaaacag

SEQ ID NO: 643 - RNA, 22 nt, synthetic construct
  misc_feature 1..22: note = Synthetic
  source 1..22: mol_type = other RNA
atcacaacctggatgaaaacag

SEQ ID NO: 644 - RNA, 25 nt, synthetic construct
  misc_feature 1..25: note = Synthetic
  source 1..25: mol_type = other RNA
cctggaaggttccgatgatgcagtc

SEQ ID NO: 645 - RNA, 24 nt, synthetic construct
  misc_feature 1..24: note = Synthetic
  source 1..24: mol_type = other RNA
ctggaaggttccgatgatgcagtc

SEQ ID NO: 646 - RNA, 23 nt, synthetic construct
  misc_feature 1..23: note = Synthetic
  source 1..23: mol_type = other RNA
tggaaggttccgatgatgcagtc

SEQ ID NO: 647 - RNA, 22 nt, synthetic construct
  misc_feature 1..22: note = Synthetic
  source 1..22: mol_type = other RNA
ggaaggttccgatgatgcagtc

SEQ ID NO: 648 - RNA, 25 nt, synthetic construct
  misc_feature 1..25: note = Synthetic
  source 1..25: mol_type = other RNA
ggagtaaaagagctgatgaaacaat

SEQ ID NO: 649 - RNA, 22 nt, synthetic construct
  misc_feature 1..22: note = Synthetic
  source 1..22: mol_type = other RNA
tgtggatccaattgaacaattc

SEQ ID NO: 650 - RNA, 25 nt, synthetic construct
  misc_feature 1..25: note = Synthetic
  source 1..25: mol_type = other RNA
aaggttccgatgatgcagtcctgtt

SEQ ID NO: 651 - RNA, 20 nt, synthetic construct
  misc_feature 1..20: note = Synthetic
  source 1..20: mol_type = other RNA
ataatggggtggtgaaactg

SEQ ID NO: 652 - RNA, 25 nt, synthetic construct
  misc_feature 1..25: note = Synthetic
  source 1..25: mol_type = other RNA
gcactcttgtggatccaattgaaca

SEQ ID NO: 653 - RNA, 23 nt, synthetic construct
  misc_feature 1..23: note = Synthetic
  source 1..23: mol_type = other RNA
ggatccaattgaacaattctcag

SEQ ID NO: 654 - RNA, 22 nt, synthetic construct
  misc_feature 1..22: note = Synthetic
  source 1..22: mol_type = other RNA
gccagggacaaaacaaaatagt

SEQ ID NO: 655 - RNA, 25 nt, synthetic construct
  misc_feature 1..25: note = Synthetic
  source 1..25: mol_type = other RNA
tttgcaattctccaaattcacattc

SEQ ID NO: 656 - RNA, 25 nt, synthetic construct
  misc_feature 1..25: note = Synthetic
  source 1..25: mol_type = other RNA
ttgcaattctccaaattcacattca

SEQ ID NO: 657 - RNA, 25 nt, synthetic construct
  misc_feature 1..25: note = Synthetic
  source 1..25: mol_type = other RNA
tgcaattctccaaattcacattcat

SEQ ID NO: 658 - RNA, 25 nt, synthetic construct
  misc_feature 1..25: note = Synthetic
  source 1..25: mol_type = other RNA
gcaattctccaaattcacattcatc

SEQ ID NO: 659 - RNA, 25 nt, synthetic construct
  misc_feature 1..25: note = Synthetic
  source 1..25: mol_type = other RNA
caattctccaaattcacattcatcg

SEQ ID NO: 660 - RNA, 25 nt, synthetic construct
  misc_feature 1..25: note = Synthetic
  source 1..25: mol_type = other RNA
aattctccaaattcacattcatcgc

SEQ ID NO: 661 - RNA, 25 nt, synthetic construct
  misc_feature 1..25: note = Synthetic
  source 1..25: mol_type = other RNA
attctccaaattcacattcatcgct

SEQ ID NO: 662 - RNA, 23 nt, synthetic construct
  misc_feature 1..23: note = Synthetic
  source 1..23: mol_type = other RNA
tctccaaattcacattcatcgct

SEQ ID NO: 663 - RNA, 20 nt, synthetic construct
  misc_feature 1..20: note = Synthetic
  source 1..20: mol_type = other RNA
tccaaattcacattcatcgc

SEQ ID NO: 664 - RNA, 24 nt, synthetic construct
  misc_feature 1..24: note = Synthetic
  source 1..24: mol_type = other RNA
ttatcacaacctggatgaaaacag

SEQ ID NO: 665 - RNA, 24 nt, synthetic construct
  misc_feature 1..24: note = Synthetic
  source 1..24: mol_type = other RNA
tatcacaacctggatgaaaacagc

SEQ ID NO: 666 - RNA, 23 nt, synthetic construct
  misc_feature 1..23: note = Synthetic
  source 1..23: mol_type = other RNA
tgtggatccaattgaacaattct

SEQ ID NO: 667 - RNA, 21 nt, synthetic construct
  misc_feature 1..21: note = Synthetic
  source 1..21: mol_type = other RNA
gtggatccaattgaacaattc

SEQ ID NO: 668 - RNA, 23 nt, synthetic construct
  misc_feature 1..23: note = Synthetic
  source 1..23: mol_type = other RNA
tccaattgaacaattctcagcat

SEQ ID NO: 669 - RNA, 21 nt, synthetic construct
  misc_feature 1..21: note = Synthetic
  source 1..21: mol_type = other RNA
ccagggacaaaacaaaatagt

SEQ ID NO: 670 - RNA, 21 nt, synthetic construct
  misc_feature 1..21: note = Synthetic
  source 1..21: mol_type = other RNA
aataatggggtggtgaaactg

SEQ ID NO: 671 - RNA, 24 nt, synthetic construct
  misc_feature 1..24: note = Synthetic
  source 1..24: mol_type = other RNA
tggatccaattgaacaattctcag

SEQ ID NO: 672 - RNA, 23 nt, synthetic construct
  misc_feature 1..23: note = Synthetic
  source 1..23: mol_type = other RNA
agccagggacaaaacaaaatagt

SEQ ID NO: 673 - RNA, 23 nt, synthetic construct
  misc_feature 1..23: note = Synthetic
  source 1..23: mol_type = other RNA
gccagggacaaaacaaaatagtt

SEQ ID NO: 674 - RNA, 24 nt, synthetic construct
  misc_feature 1..24: note = Synthetic
  source 1..24: mol_type = other RNA
ttctccaaattcacattcatcgct

SEQ ID NO: 675 - RNA, 24 nt, synthetic construct
  misc_feature 1..24: note = Synthetic
  source 1..24: mol_type = other RNA
tctccaaattcacattcatcgctt

SEQ ID NO: 676 - RNA, 21 nt, synthetic construct
  misc_feature 1..21: note = Synthetic
  source 1..21: mol_type = other RNA
ctccaaattcacattcatcgc

SEQ ID NO: 677 - RNA, 21 nt, synthetic construct
  misc_feature 1..21: note = Synthetic
  source 1..21: mol_type = other RNA
tccaaattcacattcatcgct

SEQ ID NO: 678 - RNA, 25 nt, synthetic construct
  misc_feature 1..25: note = Synthetic
  source 1..25: mol_type = other RNA
gtaattctgcacatattcttcttcc

SEQ ID NO: 679 - RNA, 25 nt, synthetic construct
  misc_feature 1..25: note = Synthetic
  source 1..25: mol_type = other RNA
tttatcacaacctggatgaaaacag

SEQ ID NO: 680 - RNA, 22 nt, synthetic construct
  misc_feature 1..22: note = Synthetic
  source 1..22: mol_type = other RNA
gtggatccaattgaacaattct

SEQ ID NO: 681 - RNA, 24 nt, synthetic construct
  misc_feature 1..24: note = Synthetic
  source 1..24: mol_type = other RNA
tccaattgaacaattctcagcatt

SEQ ID NO: 682 - RNA, 22 nt, synthetic construct
  misc_feature 1..22: note = Synthetic
  source 1..22: mol_type = other RNA
ccagggacaaaacaaaatagtt

SEQ ID NO: 683 - RNA, 22 nt, synthetic construct
  misc_feature 1..22: note = Synthetic
  source 1..22: mol_type = other RNA
tccaaattcacattcatcgctt

SEQ ID NO: 684 - RNA, 22 nt, synthetic construct
  misc_feature 1..22: note = Synthetic
  source 1..22: mol_type = other RNA
ccaaattcacattcatcgcttg

SEQ ID NO: 685 - RNA, 23 nt, synthetic construct
  misc_feature 1..23: note = Synthetic
  source 1..23: mol_type = other RNA
tggtaattctgcacatattcttc

SEQ ID NO: 686 - RNA, 25 nt, synthetic construct
  misc_feature 1..25: note = Synthetic
  source 1..25: mol_type = other RNA
gtggatccaattgaacaattctcag

SEQ ID NO: 687 - RNA, 25 nt, synthetic construct
  misc_feature 1..25: note = Synthetic
  source 1..25: mol_type = other RNA
tggatccaattgaacaattctcagc

SEQ ID NO: 688 - RNA, 21 nt, synthetic construct
  misc_feature 1..21: note = Synthetic
  source 1..21: mol_type = other RNA
ggatccaattgaacaattctc

SEQ ID NO: 689 - RNA, 24 nt, synthetic construct
  misc_feature 1..24: note = Synthetic
  source 1..24: mol_type = other RNA
caagccagggacaaaacaaaatag

SEQ ID NO: 690 - RNA, 24 nt, synthetic construct
  misc_feature 1..24: note = Synthetic
  source 1..24: mol_type = other RNA
aagccagggacaaaacaaaatagt

SEQ ID NO: 691 - RNA, 24 nt, synthetic construct
  misc_feature 1..24: note = Synthetic
  source 1..24: mol_type = other RNA
agccagggacaaaacaaaatagtt

SEQ ID NO: 692 - RNA, 24 nt, synthetic construct
  misc_feature 1..24: note = Synthetic
  source 1..24: mol_type = other RNA
gccagggacaaaacaaaatagttg

SEQ ID NO: 693 - RNA, 25 nt, synthetic construct
  misc_feature 1..25: note = Synthetic
  source 1..25: mol_type = other RNA
ttctccaaattcacattcatcgctt

SEQ ID NO: 694 - RNA, 25 nt, synthetic construct
  misc_feature 1..25: note = Synthetic
  source 1..25: mol_type = other RNA
tctccaaattcacattcatcgcttg

SEQ ID NO: 695 - RNA, 22 nt, synthetic construct
  misc_feature 1..22: note = Synthetic
  source 1..22: mol_type = other RNA
ctccaaattcacattcatcgct

SEQ ID NO: 696 - RNA, 20 nt, synthetic construct
  misc_feature 1..20: note = Synthetic
  source 1..20: mol_type = other RNA
gttccgatgatgcagtcctg

SEQ ID NO: 697 - RNA, 20 nt, synthetic construct
  misc_feature 1..20: note = Synthetic
  source 1..20: mol_type = other RNA
ttccgatgatgcagtcctgt

SEQ ID NO: 698 - RNA, 20 nt, synthetic construct
  misc_feature 1..20: note = Synthetic
  source 1..20: mol_type = other RNA
tccgatgatgcagtcctgtt

SEQ ID NO: 699 - RNA, 24 nt, synthetic construct
  misc_feature 1..24: note = Synthetic
  source 1..24: mol_type = other RNA
tccgatgatgcagtcctgttacaa

SEQ ID NO: 700 - RNA, 25 nt, synthetic construct
  misc_feature 1..25: note = Synthetic
  source 1..25: mol_type = other RNA
tccgatgatgcagtcctgttacaaa

SEQ ID NO: 701 - RNA, 25 nt, synthetic construct
  misc_feature 1..25: note = Synthetic
  source 1..25: mol_type = other RNA
tccaattgaacaattctcagcattt

SEQ ID NO: 702 - RNA, 23 nt, synthetic construct
  misc_feature 1..23: note = Synthetic
  source 1..23: mol_type = other RNA
ccagggacaaaacaaaatagttg

SEQ ID NO: 703 - RNA, 23 nt, synthetic construct
  misc_feature 1..23: note = Synthetic
  source 1..23: mol_type = other RNA
ctccaaattcacattcatcgctt

SEQ ID NO: 704 - RNA, 23 nt, synthetic construct
  misc_feature 1..23: note = Synthetic
  source 1..23: mol_type = other RNA
tccaaattcacattcatcgcttg

SEQ ID NO: 705 - RNA, 24 nt, synthetic construct
  misc_feature 1..24: note = Synthetic
  source 1..24: mol_type = other RNA
ttggtaattctgcacatattcttc

SEQ ID NO: 706 - RNA, 24 nt, synthetic construct
  misc_feature 1..24: note = Synthetic
  source 1..24: mol_type = other RNA
tggtaattctgcacatattcttct

SEQ ID NO: 707 - RNA, 20 nt, synthetic construct
  misc_feature 1..20: note = Synthetic
  source 1..20: mol_type = other RNA
taataatggggtggtgaaac

SEQ ID NO: 708 - RNA, 22 nt, synthetic construct
  misc_feature 1..22: note = Synthetic
  source 1..22: mol_type = other RNA
tggatccaattgaacaattctc

SEQ ID NO: 709 - RNA, 25 nt, synthetic construct
  misc_feature 1..25: note = Synthetic
  source 1..25: mol_type = other RNA
caagccagggacaaaacaaaatagt

SEQ ID NO: 710 - RNA, 25 nt, synthetic construct
  misc_feature 1..25: note = Synthetic
  source 1..25: mol_type = other RNA
agccagggacaaaacaaaatagttg

SEQ ID NO: 711 - RNA, 21 nt, synthetic construct
  misc_feature 1..21: note = Synthetic
  source 1..21: mol_type = other RNA
ttccgatgatgcagtcctgtt

SEQ ID NO: 712 - RNA, 25 nt, synthetic construct
  misc_feature 1..25: note = Synthetic
  source 1..25: mol_type = other RNA
tttggtaattctgcacatattcttc

SEQ ID NO: 713 - RNA, 25 nt, synthetic construct
  misc_feature 1..25: note = Synthetic
  source 1..25: mol_type = other RNA
ttggtaattctgcacatattcttct

SEQ ID NO: 714 - RNA, 25 nt, synthetic construct
  misc_feature 1..25: note = Synthetic
  source 1..25: mol_type = other RNA
tggtaattctgcacatattcttctt

SEQ ID NO: 715 - RNA, 23 nt, synthetic construct
  misc_feature 1..23: note = Synthetic
  source 1..23: mol_type = other RNA
tggatccaattgaacaattctca

SEQ ID NO: 716 - RNA, 22 nt, synthetic construct
  misc_feature 1..22: note = Synthetic
  source 1..22: mol_type = other RNA
gttccgatgatgcagtcctgtt

SEQ ID NO: 717 - RNA, 22 nt, synthetic construct
  misc_feature 1..22: note = Synthetic
  source 1..22: mol_type = other RNA
ttccgatgatgcagtcctgtta

SEQ ID NO: 718 - RNA, 22 nt, synthetic construct
  misc_feature 1..22: note = Synthetic
  source 1..22: mol_type = other RNA
ggtaattctgcacatattcttc

SEQ ID NO: 719 - RNA, 23 nt, synthetic construct
  misc_feature 1..23: note = Synthetic
  source 1..23: mol_type = other RNA
tccgatgatgcagtcctgttaca

SEQ ID NO: 720 - RNA, 23 nt, synthetic construct
  misc_feature 1..23: note = Synthetic
  source 1..23: mol_type = other RNA
ggtaattctgcacatattcttct

SEQ ID NO: 721 - RNA, 24 nt, synthetic construct
  misc_feature 1..24: note = Synthetic
  source 1..24: mol_type = other RNA
ttccgatgatgcagtcctgttaca

SEQ ID NO: 722 - RNA, 24 nt, synthetic construct
  misc_feature 1..24: note = Synthetic
  source 1..24: mol_type = other RNA
gtaattctgcacatattcttcttc

SEQ ID NO: 723 - RNA, 25 nt, synthetic construct
  misc_feature 1..25: note = Synthetic
  source 1..25: mol_type = other RNA
attgaacaattctcagcatttgtac

SEQ ID NO: 724 - RNA, 23 nt, synthetic construct
  misc_feature 1..23: note = Synthetic
  source 1..23: mol_type = other RNA
atcacaacctggatgaaaacagc

SEQ ID NO: 725 - RNA, 22 nt, synthetic construct
  misc_feature 1..22: note = Synthetic
  source 1..22: mol_type = other RNA
tcacaacctggatgaaaacagc

SEQ ID NO: 726 - RNA, 21 nt, synthetic construct
  misc_feature 1..21: note = Synthetic
  source 1..21: mol_type = other RNA
cacaacctggatgaaaacagc

SEQ ID NO: 727 - RNA, 21 nt, synthetic construct
  misc_feature 1..21: note = Synthetic
  source 1..21: mol_type = other RNA
gaaggttccgatgatgcagtc

SEQ ID NO: 728 - RNA, 23 nt, synthetic construct
  misc_feature 1..23: note = Synthetic
  source 1..23: mol_type = other RNA
gaaggttccgatgatgcagtcct

SEQ ID NO: 729 - RNA, 20 nt, synthetic construct
  misc_feature 1..20: note = Synthetic
  source 1..20: mol_type = other RNA
aaggttccgatgatgcagtc

SEQ ID NO: 730 - RNA, 22 nt, synthetic construct
  misc_feature 1..22: note = Synthetic
  source 1..22: mol_type = other RNA
aaggttccgatgatgcagtcct

SEQ ID NO: 731 - RNA, 23 nt, synthetic construct
  misc_feature 1..23: note = Synthetic
  source 1..23: mol_type = other RNA
ggagcttgggagggttcaagacg

SEQ ID NO: 732 - RNA, 22 nt, synthetic construct
  misc_feature 1..22: note = Synthetic
  source 1..22: mol_type = other RNA
cctgagatccctggaaggttcc

SEQ ID NO: 733 - RNA, 21 nt, synthetic construct
  misc_feature 1..21: note = Synthetic
  source 1..21: mol_type = other RNA
tggctgtaataatggggtggt

SEQ ID NO: 734 - RNA, 20 nt, synthetic construct
  misc_feature 1..20: note = Synthetic
  source 1..20: mol_type = other RNA
ggctgtaataatggggtggt

SEQ ID NO: 735 - RNA, 21 nt, synthetic construct
  misc_feature 1..21: note = Synthetic
  source 1..21: mol_type = other RNA
ggctgtaataatggggtggtg

SEQ ID NO: 736 - RNA, 22 nt, synthetic construct
  misc_feature 1..22: note = Synthetic
  source 1..22: mol_type = other RNA
ttggctgtaataatggggtggt

SEQ ID NO: 737 - RNA, 23 nt, synthetic construct
  misc_feature 1..23: note = Synthetic
  source 1..23: mol_type = other RNA
ttggctgtaataatggggtggtg

SEQ ID NO: 738 - RNA, 20 nt, synthetic construct
  misc_feature 1..20: note = Synthetic
  source 1..20: mol_type = other RNA
atggcaagtaagtcaggcat

SEQ ID NO: 739 - RNA, 24 nt, synthetic construct
  misc_feature 1..24: note = Synthetic
  source 1..24: mol_type = other RNA
tggctgtaataatggggtggtgaa

SEQ ID NO: 740 - RNA, 23 nt, synthetic construct
  misc_feature 1..23: note = Synthetic
  source 1..23: mol_type = other RNA
ggctgtaataatggggtggtgaa

SEQ ID NO: 741 - RNA, 20 nt, synthetic construct
  misc_feature 1..20: note = Synthetic
  source 1..20: mol_type = other RNA
gctgtaataatggggtggtg

SEQ ID NO: 742 - RNA, 22 nt, synthetic construct
  misc_feature 1..22: note = Synthetic
  source 1..22: mol_type = other RNA
ggagcttgggagggttcaagac

SEQ ID NO: 743 - RNA, 20 nt, synthetic construct
  misc_feature 1..20: note = Synthetic
  source 1..20: mol_type = other RNA
atggagttcactaggtgcac

SEQ ID NO: 744 - RNA, 21 nt, synthetic construct
  misc_feature 1..21: note = Synthetic
  source 1..21: mol_type = other RNA
aatggcaagtaagtcaggcat

SEQ ID NO: 745 - RNA, 21 nt, synthetic construct
  misc_feature 1..21: note = Synthetic
  source 1..21: mol_type = other RNA
atggcaagtaagtcaggcatt

SEQ ID NO: 746 - RNA, 25 nt, synthetic construct
  misc_feature 1..25: note = Synthetic
  source 1..25: mol_type = other RNA
ttggctgtaataatggggtggtgaa

SEQ ID NO: 747 - RNA, 20 nt, synthetic construct
  misc_feature 1..20: note = Synthetic
  source 1..20: mol_type = other RNA
taatggggtggtgaaactgg

SEQ ID NO: 748 - RNA, 24 nt, synthetic construct
  misc_feature 1..24: note = Synthetic
  source 1..24: mol_type = other RNA
tggcaagtaagtcaggcatttccg

SEQ ID NO: 749 - RNA, 22 nt, synthetic construct
  misc_feature 1..22: note = Synthetic
  source 1..22: mol_type = other RNA
gctgtaataatggggtggtgaa

SEQ ID NO: 750 - RNA, 22 nt, synthetic construct
  misc_feature 1..22: note = Synthetic
  source 1..22: mol_type = other RNA
aatggcaagtaagtcaggcatt

SEQ ID NO: 751 - RNA, 22 nt, synthetic construct
  misc_feature 1..22: note = Synthetic
  source 1..22: mol_type = other RNA
atggcaagtaagtcaggcattt

SEQ ID NO: 752 - RNA, 24 nt, synthetic construct
  misc_feature 1..24: note = Synthetic
  source 1..24: mol_type = other RNA
gcaagtaagtcaggcatttccgct

SEQ ID NO: 753 - RNA, 21 nt, synthetic construct
  misc_feature 1..21: note = Synthetic
  source 1..21: mol_type = other RNA
ataatggggtggtgaaactgg

SEQ ID NO: 754 - RNA, 20 nt, synthetic construct
  misc_feature 1..20: note = Synthetic
  source 1..20: mol_type = other RNA
aatggcaagtaagtcaggca

SEQ ID NO: 755 - RNA, 25 nt, synthetic construct
  misc_feature 1..25: note = Synthetic
  source 1..25: mol_type = other RNA
atggcaagtaagtcaggcatttccg

SEQ ID NO: 756 - RNA, 25 nt, synthetic construct
  misc_feature 1..25: note = Synthetic
  source 1..25: mol_type = other RNA
cgatgatgcagtcctgttacaaaga

SEQ ID NO: 757 - RNA, 23 nt, synthetic construct
  misc_feature 1..23: note = Synthetic
  source 1..23: mol_type = other RNA
aatggcaagtaagtcaggcattt

SEQ ID NO: 758 - RNA, 21 nt, synthetic construct
  misc_feature 1..21: note = Synthetic
  source 1..21: mol_type = other RNA
gcaagtaagtcaggcatttcc

SEQ ID NO: 759 - RNA, 25 nt, synthetic construct
  misc_feature 1..25: note = Synthetic
  source 1..25: mol_type = other RNA
gcaagtaagtcaggcatttccgctt

SEQ ID NO: 760 - RNA, 23 nt, synthetic construct
  misc_feature 1..23: note = Synthetic
  source 1..23: mol_type = other RNA
caagtaagtcaggcatttccgct

SEQ ID NO: 761 - RNA, 22 nt, synthetic construct
  misc_feature 1..22: note = Synthetic
  source 1..22: mol_type = other RNA
aataatggggtggtgaaactgg

SEQ ID NO: 762 - RNA, 21 nt, synthetic construct
  misc_feature 1..21: note = Synthetic
  source 1..21: mol_type = other RNA
ggcaagtaagtcaggcatttc

SEQ ID NO: 763 - RNA, 25 nt, synthetic construct
  misc_feature 1..25: note = Synthetic
  source 1..25: mol_type = other RNA
ccgatgatgcagtcctgttacaaag

SEQ ID NO: 764 - RNA, 22 nt, synthetic construct
  misc_feature 1..22: note = Synthetic
  source 1..22: mol_type = other RNA
gcaagtaagtcaggcatttccg

SEQ ID NO: 765 - RNA, 22 nt, synthetic construct
  misc_feature 1..22: note = Synthetic
  source 1..22: mol_type = other RNA
caagtaagtcaggcatttccgc

SEQ ID NO: 766 - RNA, 23 nt, synthetic construct
  misc_feature 1..23: note = Synthetic
  source 1..23: mol_type = other RNA
gtttggtaattctgcacatattc

SEQ ID NO: 767 - RNA, 23 nt, synthetic construct
  misc_feature 1..23: note = Synthetic
  source 1..23: mol_type = other RNA
taataatggggtggtgaaactgg

SEQ ID NO: 768 - RNA, 22 nt, synthetic construct
  misc_feature 1..22: note = Synthetic
  source 1..22: mol_type = other RNA
tggcaagtaagtcaggcatttc

SEQ ID NO: 769 - RNA, 22 nt, synthetic construct
  misc_feature 1..22: note = Synthetic
  source 1..22: mol_type = other RNA
ggcaagtaagtcaggcatttcc

SEQ ID NO: 770 - RNA, 20 nt, synthetic construct
  misc_feature 1..20: note = Synthetic
  source 1..20: mol_type = other RNA
ccgatgatgcagtcctgtta

SEQ ID NO: 771 - RNA, 20 nt, synthetic construct
  misc_feature 1..20: note = Synthetic
  source 1..20: mol_type = other RNA
cgatgatgcagtcctgttac

SEQ ID NO: 772 - RNA, 23 nt, synthetic construct
  misc_feature 1..23: note = Synthetic
  source 1..23: mol_type = other RNA
ccaaattcacattcatcgcttgt

SEQ ID NO: 773 - RNA, 24 nt, synthetic construct
  misc_feature 1..24: note = Synthetic
  source 1..24: mol_type = other RNA
gtttggtaattctgcacatattct

SEQ ID NO: 774 - RNA, 20 nt, synthetic construct
  misc_feature 1..20: note = Synthetic
  source 1..20: mol_type = other RNA
gtaataatggggtggtgaaa

SEQ ID NO: 775 - RNA, 23 nt, synthetic construct
  misc_feature 1..23: note = Synthetic
  source 1..23: mol_type = other RNA
gtaataatggggtggtgaaactg

SEQ ID NO: 776 - RNA, 23 nt, synthetic construct
  misc_feature 1..23: note = Synthetic
  source 1..23: mol_type = other RNA
ggcaagtaagtcaggcatttccg

SEQ ID NO: 777 - RNA, 22 nt, synthetic construct
  misc_feature 1..22: note = Synthetic
  source 1..22: mol_type = other RNA
ccgatgatgcagtcctgttaca

SEQ ID NO: 778 - RNA, 22 nt, synthetic construct
  misc_feature 1..22: note = Synthetic
  source 1..22: mol_type = other RNA
gtaataatggggtggtgaaact

SEQ ID NO: 779 - RNA, 25 nt, synthetic construct
  misc_feature 1..25: note = Synthetic
  source 1..25: mol_type = other RNA
ctccaaattcacattcatcgcttgt

SEQ ID NO: 780 - RNA, 24 nt, synthetic construct
  misc_feature 1..24: note = Synthetic
  source 1..24: mol_type = other RNA
tgcagtaatctatgagtttcttcc

SEQ ID NO: 781 - RNA, 22 nt, synthetic construct
  misc_feature 1..22: note = Synthetic
  source 1..22: mol_type = other RNA
gtaggacattggcagttgtttc

SEQ ID NO: 782 - RNA, 23 nt, synthetic construct
  misc_feature 1..23: note = Synthetic
  source 1..23: mol_type = other RNA
tgtaggacattggcagttgtttc

SEQ ID NO: 783 - RNA, 24 nt, synthetic construct
  misc_feature 1..24: note = Synthetic
  source 1..24: mol_type = other RNA
ctgtaggacattggcagttgtttc

SEQ ID NO: 784 - RNA, 25 nt, synthetic construct
  misc_feature 1..25: note = Synthetic
  source 1..25: mol_type = other RNA
cctgtaggacattggcagttgtttc

SEQ ID NO: 785 - RNA, 24 nt, synthetic construct
  misc_feature 1..24: note = Synthetic
  source 1..24: mol_type = other RNA
cctgtaggacattggcagttgttt

SEQ ID NO: 786 - RNA, 25 nt, synthetic construct
  misc_feature 1..25: note = Synthetic
  source 1..25: mol_type = other RNA
tcctgtaggacattggcagttgttt

SEQ ID NO: 787 - RNA, 22 nt, synthetic construct
  misc_feature 1..22: note = Synthetic
  source 1..22: mol_type = other RNA
ctgtaggacattggcagttgtt

SEQ ID NO: 788 - RNA, 23 nt, synthetic construct
  misc_feature 1..23: note = Synthetic
  source 1..23: mol_type = other RNA
cctgtaggacattggcagttgtt

SEQ ID NO: 789 - RNA, 24 nt, synthetic construct
  misc_feature 1..24: note = Synthetic
  source 1..24: mol_type = other RNA
tcctgtaggacattggcagttgtt

SEQ ID NO: 790 - RNA, 20 nt, synthetic construct
  misc_feature 1..20: note = Synthetic
  source 1..20: mol_type = other RNA
tgtaggacattggcagttgt

SEQ ID NO: 791 - RNA, 21 nt, synthetic construct
  misc_feature 1..21: note = Synthetic
  source 1..21: mol_type = other RNA
ctgtaggacattggcagttgt

SEQ ID NO: 792 - RNA, 22 nt, synthetic construct
  misc_feature 1..22: note = Synthetic
  source 1..22: mol_type = other RNA
cctgtaggacattggcagttgt

SEQ ID NO: 793 - RNA, 23 nt, synthetic construct
  misc_feature 1..23: note = Synthetic
  source 1..23: mol_type = other RNA
tcctgtaggacattggcagttgt

SEQ ID NO: 794 - RNA, 21 nt, synthetic construct
  misc_feature 1..21: note = Synthetic
  source 1..21: mol_type = other RNA
cctgtaggacattggcagttg

SEQ ID NO: 795 - RNA, 22 nt, synthetic construct
  misc_feature 1..22: note = Synthetic
  source 1..22: mol_type = other RNA
tcctgtaggacattggcagttg

SEQ ID NO: 796 - RNA, 21 nt, synthetic construct
  misc_feature 1..21: note = Synthetic
  source 1..21: mol_type = other RNA
tcctgtaggacattggcagtt

SEQ ID NO: 797 - RNA, 20 nt, synthetic construct
  misc_feature 1..20: note = Synthetic
  source 1..20: mol_type = other RNA
tcctgtaggacattggcagt

SEQ ID NO: 798 - RNA, 24 nt, synthetic construct
  misc_feature 1..24: note = Synthetic
  source 1..24: mol_type = other RNA
tgttgcagtaatctatgagtttct

SEQ ID NO: 799 - RNA, 25 nt, synthetic construct
  misc_feature 1..25: note = Synthetic
  source 1..25: mol_type = other RNA
ctgttgcagtaatctatgagtttct

SEQ ID NO: 800 - RNA, 24 nt, synthetic construct
  misc_feature 1..24: note = Synthetic
  source 1..24: mol_type = other RNA
ctgttgcagtaatctatgagtttc

SEQ ID NO: 801 - RNA, 23 nt, synthetic construct
  misc_feature 1..23: note = Synthetic
  source 1..23: mol_type = other RNA
atgtggacttttctggtatcatc

SEQ ID NO: 802 - RNA, 25 nt, synthetic construct
  misc_feature 1..25: note = Synthetic
  source 1..25: mol_type = other RNA
tcatgtggacttttctggtatcatc

SEQ ID NO: 803 - RNA, 24 nt, synthetic construct
  misc_feature 1..24: note = Synthetic
  source 1..24: mol_type = other RNA
tcatgtggacttttctggtatcat

SEQ ID NO: 804 - RNA, 25 nt, synthetic construct
  misc_feature 1..25: note = Synthetic
  source 1..25: mol_type = other RNA
atcatgtggacttttctggtatcat

SEQ ID NO: 805 - RNA, 23 nt, synthetic construct
  misc_feature 1..23: note = Synthetic
  source 1..23: mol_type = other RNA
tcatgtggacttttctggtatca

SEQ ID NO: 806 - RNA, 24 nt, synthetic construct
  misc_feature 1..24: note = Synthetic
  source 1..24: mol_type = other RNA
atcatgtggacttttctggtatca

SEQ ID NO: 807 - RNA, 22 nt, synthetic construct
  misc_feature 1..22: note = Synthetic
  source 1..22: mol_type = other RNA
tcatgtggacttttctggtatc

SEQ ID NO: 808 - RNA, 23 nt, synthetic construct
  misc_feature 1..23: note = Synthetic
  source 1..23: mol_type = other RNA
atcatgtggacttttctggtatc

SEQ ID NO: 809 - RNA, 25 nt, synthetic construct
  misc_feature 1..25: note = Synthetic
  source 1..25: mol_type = other RNA
ttatcatgtggacttttctggtatc

SEQ ID NO: 810 - RNA, 21 nt, synthetic construct
  misc_feature 1..21: note = Synthetic
  source 1..21: mol_type = other RNA
tcatgtggacttttctggtat

SEQ ID NO: 811 - RNA, 22 nt, synthetic construct
  misc_feature 1..22: note = Synthetic
  source 1..22: mol_type = other RNA
atcatgtggacttttctggtat

SEQ ID NO: 812 - RNA, 25 nt, synthetic construct
  misc_feature 1..25: note = Synthetic
  source 1..25: mol_type = other RNA
gttatcatgtggacttttctggtat

SEQ ID NO: 813 - RNA, 20 nt, synthetic construct
  misc_feature 1..20: note = Synthetic
  source 1..20: mol_type = other RNA
tcatgtggacttttctggta

SEQ ID NO: 814 - RNA, 21 nt, synthetic construct
  misc_feature 1..21: note = Synthetic
  source 1..21: mol_type = other RNA
atcatgtggacttttctggta

SEQ ID NO: 815 - RNA, 23 nt, synthetic construct
  misc_feature 1..23: note = Synthetic
  source 1..23: mol_type = other RNA
ttatcatgtggacttttctggta

SEQ ID NO: 816 - RNA, 24 nt, synthetic construct
  misc_feature 1..24: note = Synthetic
  source 1..24: mol_type = other RNA
gttatcatgtggacttttctggta

SEQ ID NO: 817 - RNA, 25 nt, synthetic construct
  misc_feature 1..25: note = Synthetic
  source 1..25: mol_type = other RNA
tgttatcatgtggacttttctggta

SEQ ID NO: 818 - RNA, 20 nt, synthetic construct
  misc_feature 1..20: note = Synthetic
  source 1..20: mol_type = other RNA
atcatgtggacttttctggt

SEQ ID NO: 819 - RNA, 22 nt, synthetic construct
  misc_feature 1..22: note = Synthetic
  source 1..22: mol_type = other RNA
ttatcatgtggacttttctggt

SEQ ID NO: 820 - RNA, 23 nt, synthetic construct
  misc_feature 1..23: note = Synthetic
  source 1..23: mol_type = other RNA
gttatcatgtggacttttctggt

SEQ ID NO: 821 - RNA, 24 nt, synthetic construct
  misc_feature 1..24: note = Synthetic
  source 1..24: mol_type = other RNA
tgttatcatgtggacttttctggt

SEQ ID NO: 822 - RNA, 25 nt, synthetic construct
  misc_feature 1..25: note = Synthetic
  source 1..25: mol_type = other RNA
ctgttatcatgtggacttttctggt

SEQ ID NO: 823 - RNA, 21 nt, synthetic construct
  misc_feature 1..21: note = Synthetic
  source 1..21: mol_type = other RNA
ttatcatgtggacttttctgg

SEQ ID NO: 824 - RNA, 22 nt, synthetic construct
  misc_feature 1..22: note = Synthetic
  source 1..22: mol_type = other RNA
gttatcatgtggacttttctgg

SEQ ID NO: 825 - RNA, 23 nt, synthetic construct
  misc_feature 1..23: note = Synthetic
  source 1..23: mol_type = other RNA
tgttatcatgtggacttttctgg

SEQ ID NO: 826 - RNA, 24 nt, synthetic construct
  misc_feature 1..24: note = Synthetic
  source 1..24: mol_type = other RNA
ctgttatcatgtggacttttctgg

SEQ ID NO: 827 - RNA, 25 nt, synthetic construct
  misc_feature 1..25: note = Synthetic
  source 1..25: mol_type = other RNA
tctgttatcatgtggacttttctgg

SEQ ID NO: 828 - RNA, 21 nt, synthetic construct
  misc_feature 1..21: note = Synthetic
  source 1..21: mol_type = other RNA
gttatcatgtggacttttctg

SEQ ID NO: 829 - RNA, 22 nt, synthetic construct
  misc_feature 1..22: note = Synthetic
  source 1..22: mol_type = other RNA
tgttatcatgtggacttttctg

SEQ ID NO: 830 - RNA, 23 nt, synthetic construct
  misc_feature 1..23: note = Synthetic
  source 1..23: mol_type = other RNA
ctgttatcatgtggacttttctg

SEQ ID NO: 831 - RNA, 24 nt, synthetic construct
  misc_feature 1..24: note = Synthetic
  source 1..24: mol_type = other RNA
tctgttatcatgtggacttttctg

SEQ ID NO: 832 - RNA, 25 nt, synthetic construct
  misc_feature 1..25: note = Synthetic
  source 1..25: mol_type = other RNA
ctctgttatcatgtggacttttctg

SEQ ID NO: 833 - RNA, 23 nt, synthetic construct
  misc_feature 1..23: note = Synthetic
  source 1..23: mol_type = other RNA
tctgttatcatgtggacttttct

SEQ ID NO: 834 - RNA, 24 nt, synthetic construct
  misc_feature 1..24: note = Synthetic
  source 1..24: mol_type = other RNA
ctctgttatcatgtggacttttct

SEQ ID NO: 835 - RNA, 25 nt, synthetic construct
  misc_feature 1..25: note = Synthetic
  source 1..25: mol_type = other RNA
tctctgttatcatgtggacttttct

SEQ ID NO: 836 - RNA, 21 nt, synthetic construct
  misc_feature 1..21: note = Synthetic
  source 1..21: mol_type = other RNA
ctgttatcatgtggacttttc

SEQ ID NO: 837 - RNA, 22 nt, synthetic construct
  misc_feature 1..22: note = Synthetic
  source 1..22: mol_type = other RNA
tctgttatcatgtggacttttc

SEQ ID NO: 838 - RNA, 23 nt, synthetic construct
  misc_feature 1..23: note = Synthetic
  source 1..23: mol_type = other RNA
ctctgttatcatgtggacttttc

SEQ ID NO: 839 - RNA, 24 nt, synthetic construct
  misc_feature 1..24: note = Synthetic
  source 1..24: mol_type = other RNA
tctctgttatcatgtggacttttc

SEQ ID NO: 840 - RNA, 25 nt, synthetic construct
  misc_feature 1..25: note = Synthetic
  source 1..25: mol_type = other RNA
ttctctgttatcatgtggacttttc

SEQ ID NO: 841 - RNA, 22 nt, synthetic construct
  misc_feature 1..22: note = Synthetic
  source 1..22: mol_type = other RNA
ctctgttatcatgtggactttt

SEQ ID NO: 842 - RNA, 23 nt, synthetic construct
  misc_feature 1..23: note = Synthetic
  source 1..23: mol_type = other RNA
tctctgttatcatgtggactttt

SEQ ID NO: 843 - RNA, 24 nt, synthetic construct
  misc_feature 1..24: note = Synthetic
  source 1..24: mol_type = other RNA
ttctctgttatcatgtggactttt

SEQ ID NO: 844 - RNA, 25 nt, synthetic construct
  misc_feature 1..25: note = Synthetic
  source 1..25: mol_type = other RNA
attctctgttatcatgtggactttt

SEQ ID NO: 845 - RNA, 21 nt, synthetic construct
  misc_feature 1..21: note = Synthetic
  source 1..21: mol_type = other RNA
ctctgttatcatgtggacttt

SEQ ID NO: 846 - RNA, 22 nt, synthetic construct
  misc_feature 1..22: note = Synthetic
  source 1..22: mol_type = other RNA
tctctgttatcatgtggacttt

SEQ ID NO: 847 - RNA, 23 nt, synthetic construct
  misc_feature 1..23: note = Synthetic
  source 1..23: mol_type = other RNA
ttctctgttatcatgtggacttt

SEQ ID NO: 848 - RNA, 24 nt, synthetic construct
  misc_feature 1..24: note = Synthetic
  source 1..24: mol_type = other RNA
attctctgttatcatgtggacttt

SEQ ID NO: 849 - RNA, 25 nt, synthetic construct
  misc_feature 1..25: note = Synthetic
  source 1..25: mol_type = other RNA
tattctctgttatcatgtggacttt

SEQ ID NO: 850 - RNA, 20 nt, synthetic construct
  misc_feature 1..20: note = Synthetic
  source 1..20: mol_type = other RNA
ctctgttatcatgtggactt

SEQ ID NO: 851 - RNA, 21 nt, synthetic construct
  misc_feature 1..21: note = Synthetic
  source 1..21: mol_type = other RNA
tctctgttatcatgtggactt

SEQ ID NO: 852 - RNA, 22 nt, synthetic construct
  misc_feature 1..22: note = Synthetic
  source 1..22: mol_type = other RNA
ttctctgttatcatgtggactt

SEQ ID NO: 853 - RNA, 23 nt, synthetic construct
  misc_feature 1..23: note = Synthetic
  source 1..23: mol_type = other RNA
attctctgttatcatgtggactt

SEQ ID NO: 854 - RNA, 24 nt, synthetic construct
  misc_feature 1..24: note = Synthetic
  source 1..24: mol_type = other RNA
tattctctgttatcatgtggactt

SEQ ID NO: 855 - RNA, 25 nt, synthetic construct
  misc_feature 1..25: note = Synthetic
  source 1..25: mol_type = other RNA
atattctctgttatcatgtggactt

SEQ ID NO: 856 - RNA, 21 nt, synthetic construct
  misc_feature 1..21: note = Synthetic
  source 1..21: mol_type = other RNA
ttctctgttatcatgtggact

SEQ ID NO: 857 - RNA, 22 nt, synthetic construct
  misc_feature 1..22: note = Synthetic
  source 1..22: mol_type = other RNA
attctctgttatcatgtggact

SEQ ID NO: 858 - RNA, 23 nt, synthetic construct
  misc_feature 1..23: note = Synthetic
  source 1..23: mol_type = other RNA
tattctctgttatcatgtggact

SEQ ID NO: 859 - RNA, 24 nt, synthetic construct
  misc_feature 1..24: note = Synthetic
  source 1..24: mol_type = other RNA
atattctctgttatcatgtggact

SEQ ID NO: 860 - RNA, 25 nt, synthetic construct
  misc_feature 1..25: note = Synthetic
  source 1..25: mol_type = other RNA
gatattctctgttatcatgtggact

SEQ ID NO: 861 - RNA, 24 nt, synthetic construct
  misc_feature 1..24: note = Synthetic
  source 1..24: mol_type = other RNA
gatattctctgttatcatgtggac

SEQ ID NO: 862 - RNA, 25 nt, synthetic construct
  misc_feature 1..25: note = Synthetic
  source 1..25: mol_type = other RNA
tgatattctctgttatcatgtggac

SEQ ID NO: 863 - RNA, 25 nt, synthetic construct
  misc_feature 1..25: note = Synthetic
  source 1..25: mol_type = other RNA
ttgcagtaatctatgagtttcttcc

SEQ ID NO: 864 - RNA, 24 nt, synthetic construct
  misc_feature 1..24: note = Synthetic
  source 1..24: mol_type = other RNA
taggacattggcagttgtttcagc

SEQ ID NO: 865 - RNA, 25 nt, synthetic construct
  misc_feature 1..25: note = Synthetic
  source 1..25: mol_type = other RNA
gtaggacattggcagttgtttcagc

SEQ ID NO: 866 - RNA, 23 nt, synthetic construct
  misc_feature 1..23: note = Synthetic
  source 1..23: mol_type = other RNA
gtaggacattggcagttgtttca

SEQ ID NO: 867 - RNA, 24 nt, synthetic construct
  misc_feature 1..24: note = Synthetic
  source 1..24: mol_type = other RNA
tgtaggacattggcagttgtttca

SEQ ID NO: 868 - RNA, 25 nt, synthetic construct
  misc_feature 1..25: note = Synthetic
  source 1..25: mol_type = other RNA
ctgtaggacattggcagttgtttca

SEQ ID NO: 869 - RNA, 25 nt, synthetic construct
  misc_feature 1..25: note = Synthetic
  source 1..25: mol_type = other RNA
atcctgtaggacattggcagttgtt

SEQ ID NO: 870 - RNA, 24 nt, synthetic construct
  misc_feature 1..24: note = Synthetic
  source 1..24: mol_type = other RNA
atcctgtaggacattggcagttgt

SEQ ID NO: 871 - RNA, 23 nt, synthetic construct
  misc_feature 1..23: note = Synthetic
  source 1..23: mol_type = other RNA
atcctgtaggacattggcagttg

SEQ ID NO: 872 - RNA, 22 nt, synthetic construct
  misc_feature 1..22: note = Synthetic
  source 1..22: mol_type = other RNA
atcctgtaggacattggcagtt

SEQ ID NO: 873 - RNA, 25 nt, synthetic construct
  misc_feature 1..25: note = Synthetic
  source 1..25: mol_type = other RNA
agcatcctgtaggacattggcagtt

SEQ ID NO: 874 - RNA, 21 nt, synthetic construct
  misc_feature 1..21: note = Synthetic
  source 1..21: mol_type = other RNA
atcctgtaggacattggcagt

SEQ ID NO: 875 - RNA, 24 nt, synthetic construct
  misc_feature 1..24: note = Synthetic
  source 1..24: mol_type = other RNA
agcatcctgtaggacattggcagt

SEQ ID NO: 876 - RNA, 23 nt, synthetic construct
  misc_feature 1..23: note = Synthetic
  source 1..23: mol_type = other RNA
agcatcctgtaggacattggcag

SEQ ID NO: 877 - RNA, 22 nt, synthetic construct
  misc_feature 1..22: note = Synthetic
  source 1..22: mol_type = other RNA
agcatcctgtaggacattggca

SEQ ID NO: 878 - RNA, 21 nt, synthetic construct
  misc_feature 1..21: note = Synthetic
  source 1..21: mol_type = other RNA
agcatcctgtaggacattggc

SEQ ID NO: 879 - RNA, 20 nt, synthetic construct
  misc_feature 1..20: note = Synthetic
  source 1..20: mol_type = other RNA
ggacttttctggtatcatct

SEQ ID NO: 880 - RNA, 23 nt, synthetic construct
  misc_feature 1..23: note = Synthetic
  source 1..23: mol_type = other RNA
tgtggacttttctggtatcatct

SEQ ID NO: 881 - RNA, 24 nt, synthetic construct
  misc_feature 1..24: note = Synthetic
  source 1..24: mol_type = other RNA
atgtggacttttctggtatcatct

SEQ ID NO: 882 - RNA, 24 nt, synthetic construct
  misc_feature 1..24: note = Synthetic
  source 1..24: mol_type = other RNA
gtaggacattggcagttgtttcag

SEQ ID NO: 883 - RNA, 25 nt, synthetic construct
  misc_feature 1..25: note = Synthetic
  source 1..25: mol_type = other RNA
tgtaggacattggcagttgtttcag

SEQ ID NO: 884 - RNA, 25 nt, synthetic construct
  misc_feature 1..25: note = Synthetic
  source 1..25: mol_type = other RNA
catcctgtaggacattggcagttgt

SEQ ID NO: 885 - RNA, 24 nt, synthetic construct
  misc_feature 1..24: note = Synthetic
  source 1..24: mol_type = other RNA
catcctgtaggacattggcagttg

SEQ ID NO: 886 - RNA, 23 nt, synthetic construct
  misc_feature 1..23: note = Synthetic
  source 1..23: mol_type = other RNA
catcctgtaggacattggcagtt

SEQ ID NO: 887 - RNA, 22 nt, synthetic construct
  misc_feature 1..22: note = Synthetic
  source 1..22: mol_type = other RNA
catcctgtaggacattggcagt

SEQ ID NO: 888 - RNA, 25 nt, synthetic construct
  misc_feature 1..25: note = Synthetic
  source 1..25: mol_type = other RNA
tagcatcctgtaggacattggcagt

SEQ ID NO: 889 - RNA, 21 nt, synthetic construct
  misc_feature 1..21: note = Synthetic
  source 1..21: mol_type = other RNA
catcctgtaggacattggcag

SEQ ID NO: 890 - RNA, 24 nt, synthetic construct
  misc_feature 1..24: note = Synthetic
  source 1..24: mol_type = other RNA
tagcatcctgtaggacattggcag

SEQ ID NO: 891 - RNA, 23 nt, synthetic construct
  misc_feature 1..23: note = Synthetic
  source 1..23: mol_type = other RNA
tagcatcctgtaggacattggca

SEQ ID NO: 892 - RNA, 25 nt, synthetic construct
  misc_feature 1..25: note = Synthetic
  source 1..25: mol_type = other RNA
ggtagcatcctgtaggacattggca

SEQ ID NO: 893 - RNA, 22 nt, synthetic construct
  misc_feature 1..22: note = Synthetic
  source 1..22: mol_type = other RNA
tagcatcctgtaggacattggc

SEQ ID NO: 894 - RNA, 24 nt, synthetic construct
  misc_feature 1..24: note = Synthetic
  source 1..24: mol_type = other RNA
ggtagcatcctgtaggacattggc

SEQ ID NO: 895 - RNA, 21 nt, synthetic construct
  misc_feature 1..21: note = Synthetic
  source 1..21: mol_type = other RNA
tcagctcttttactcccttgg

SEQ ID NO: 896 - RNA, 22 nt, synthetic construct
  misc_feature 1..22: note = Synthetic
  source 1..22: mol_type = other RNA
atcagctcttttactcccttgg

SEQ ID NO: 897 - RNA, 23 nt, synthetic construct
  misc_feature 1..23: note = Synthetic
  source 1..23: mol_type = other RNA
catcagctcttttactcccttgg

SEQ ID NO: 898 - RNA, 24 nt, synthetic construct
  misc_feature 1..24: note = Synthetic
  source 1..24: mol_type = other RNA
tcatcagctcttttactcccttgg

SEQ ID NO: 899 - RNA, 23 nt, synthetic construct
  misc_feature 1..23: note = Synthetic
  source 1..23: mol_type = other RNA
tcatcagctcttttactcccttg

SEQ ID NO: 900 - RNA, 24 nt, synthetic construct
  misc_feature 1..24: note = Synthetic
  source 1..24: mol_type = other RNA
ttcatcagctcttttactcccttg

SEQ ID NO: 901 - RNA, 23 nt, synthetic construct
  misc_feature 1..23: note = Synthetic
  source 1..23: mol_type = other RNA
tttcatcagctcttttactccct

SEQ ID NO: 902 - RNA, 25 nt, synthetic construct
  misc_feature 1..25: note = Synthetic
  source 1..25: mol_type = other RNA
gacttacttgccattgtttcatcag

SEQ ID NO: 903 - RNA, 24 nt, synthetic construct
  misc_feature 1..24: note = Synthetic
  source 1..24: mol_type = other RNA
gacttacttgccattgtttcatca

SEQ ID NO: 904 - RNA, 23 nt, synthetic construct
  misc_feature 1..23: note = Synthetic
  source 1..23: mol_type = other RNA
gacttacttgccattgtttcatc

SEQ ID NO: 905 - RNA, 21 nt, synthetic construct
  misc_feature 1..21: note = Synthetic
  source 1..21: mol_type = other RNA
gcatcatcggaaccttccagg

SEQ ID NO: 906 - RNA, 22 nt, synthetic construct
  misc_feature 1..22: note = Synthetic
  source 1..22: mol_type = other RNA
tgcatcatcggaaccttccagg

SEQ ID NO: 907 - RNA, 24 nt, synthetic construct
  misc_feature 1..24: note = Synthetic
  source 1..24: mol_type = other RNA
tgtggacttttctggtatcatctg

SEQ ID NO: 908 - RNA, 25 nt, synthetic construct
  misc_feature 1..25: note = Synthetic
  source 1..25: mol_type = other RNA
atgtggacttttctggtatcatctg

SEQ ID NO: 909 - RNA, 25 nt, synthetic construct
  misc_feature 1..25: note = Synthetic
  source 1..25: mol_type = other RNA
gtagcatcctgtaggacattggcag

SEQ ID NO: 910 - RNA, 24 nt, synthetic construct
  misc_feature 1..24: note = Synthetic
  source 1..24: mol_type = other RNA
gtagcatcctgtaggacattggca

SEQ ID NO: 911 - RNA, 23 nt, synthetic construct
  misc_feature 1..23: note = Synthetic
  source 1..23: mol_type = other RNA
gtagcatcctgtaggacattggc

SEQ ID NO: 912 - RNA, 22 nt, synthetic construct
  misc_feature 1..22: note = Synthetic
  source 1..22: mol_type = other RNA
gtagcatcctgtaggacattgg

SEQ ID NO: 913 - RNA, 24 nt, synthetic construct
  misc_feature 1..24: note = Synthetic
  source 1..24: mol_type = other RNA
gtttcatcagctcttttactccct

SEQ ID NO: 914 - RNA, 25 nt, synthetic construct
  misc_feature 1..25: note = Synthetic
  source 1..25: mol_type = other RNA
tgacttacttgccattgtttcatca

SEQ ID NO: 915 - RNA, 24 nt, synthetic construct
  misc_feature 1..24: note = Synthetic
  source 1..24: mol_type = other RNA
tgacttacttgccattgtttcatc

SEQ ID NO: 916 - RNA, 23 nt, synthetic construct
  misc_feature 1..23: note = Synthetic
  source 1..23: mol_type = other RNA
ctgcatcatcggaaccttccagg

SEQ ID NO: 917 - RNA, 20 nt, synthetic construct
  misc_feature 1..20: note = Synthetic
  source 1..20: mol_type = other RNA
ctgcatcatcggaaccttcc

SEQ ID NO: 918 - RNA, 24 nt, synthetic construct
  misc_feature 1..24: note = Synthetic
  source 1..24: mol_type = other RNA
tgctgagaattgttcaattggatc

SEQ ID NO: 919 - RNA, 23 nt, synthetic construct
  misc_feature 1..23: note = Synthetic
  source 1..23: mol_type = other RNA
acaggactgcatcatcggaacct

SEQ ID NO: 920 - RNA, 22 nt, synthetic construct
  misc_feature 1..22: note = Synthetic
  source 1..22: mol_type = other RNA
acaggactgcatcatcggaacc

SEQ ID NO: 921 - RNA, 24 nt, synthetic construct
  misc_feature 1..24: note = Synthetic
  source 1..24: mol_type = other RNA
actgcatcatcggaaccttccagg

SEQ ID NO: 922 - RNA, 23 nt, synthetic construct
  misc_feature 1..23: note = Synthetic
  source 1..23: mol_type = other RNA
actgcatcatcggaaccttccag

SEQ ID NO: 923 - RNA, 21 nt, synthetic construct
  misc_feature 1..21: note = Synthetic
  source 1..21: mol_type = other RNA
actgcatcatcggaaccttcc

SEQ ID NO: 924 - RNA, 25 nt, synthetic construct
  misc_feature 1..25: note = Synthetic
  source 1..25: mol_type = other RNA
acaggactgcatcatcggaaccttc

SEQ ID NO: 925 - RNA, 25 nt, synthetic construct
  misc_feature 1..25: note = Synthetic
  source 1..25: mol_type = other RNA
gtaacaggactgcatcatcggaacc

SEQ ID NO: 926 - RNA, 24 nt, synthetic construct
  misc_feature 1..24: note = Synthetic
  source 1..24: mol_type = other RNA
gtaacaggactgcatcatcggaac

SEQ ID NO: 927 - RNA, 23 nt, synthetic construct
  misc_feature 1..23: note = Synthetic
  source 1..23: mol_type = other RNA
gagaattgttcaattggatccac

SEQ ID NO: 928 - RNA, 25 nt, synthetic construct
  misc_feature 1..25: note = Synthetic
  source 1..25: mol_type = other RNA
tgctgagaattgttcaattggatcc

SEQ ID NO: 929 - RNA, 25 nt, synthetic construct
  misc_feature 1..25: note = Synthetic
  source 1..25: mol_type = other RNA
atgctgagaattgttcaattggatc

SEQ ID NO: 930 - RNA, 24 nt, synthetic construct
  misc_feature 1..24: note = Synthetic
  source 1..24: mol_type = other RNA
acaggactgcatcatcggaacctt

SEQ ID NO: 931 - RNA, 20 nt, synthetic construct
  misc_feature 1..20: note = Synthetic
  source 1..20: mol_type = other RNA
ggactgcatcatcggaacct

SEQ ID NO: 932 - RNA, 24 nt, synthetic construct
  misc_feature 1..24: note = Synthetic
  source 1..24: mol_type = other RNA
tgagaattgttcaattggatccac

SEQ ID NO: 933 - RNA, 25 nt, synthetic construct
  misc_feature 1..25: note = Synthetic
  source 1..25: mol_type = other RNA
taacaggactgcatcatcggaacct

SEQ ID NO: 934 - RNA, 24 nt, synthetic construct
  misc_feature 1..24: note = Synthetic
  source 1..24: mol_type = other RNA
taacaggactgcatcatcggaacc

SEQ ID NO: 935 - RNA, 25 nt, synthetic construct
  misc_feature 1..25: note = Synthetic
  source 1..25: mol_type = other RNA
ggactgcatcatcggaaccttccag

SEQ ID NO: 936 - RNA, 24 nt, synthetic construct
  misc_feature 1..24: note = Synthetic
  source 1..24: mol_type = other RNA
ggactgcatcatcggaaccttcca

SEQ ID NO: 937 - RNA, 23 nt, synthetic construct
  misc_feature 1..23: note = Synthetic
  source 1..23: mol_type = other RNA
ggactgcatcatcggaaccttcc

SEQ ID NO: 938 - RNA, 24 nt, synthetic construct
  misc_feature 1..24: note = Synthetic
  source 1..24: mol_type = other RNA
gagaattgttcaattggatccaca

SEQ ID NO: 939 - RNA, 25 nt, synthetic construct
  misc_feature 1..25: note = Synthetic
  source 1..25: mol_type = other RNA
gagaattgttcaattggatccacaa

SEQ ID NO: 940 - RNA, 25 nt, synthetic construct
  misc_feature 1..25: note = Synthetic
  source 1..25: mol_type = other RNA
tgagaattgttcaattggatccaca

SEQ ID NO: 941 - RNA, 21 nt, synthetic construct
  misc_feature 1..21: note = Synthetic
  source 1..21: mol_type = other RNA
acaggactgcatcatcggaac

SEQ ID NO: 942 - RNA, 21 nt, synthetic construct
  misc_feature 1..21: note = Synthetic
  source 1..21: mol_type = other RNA
taacaggactgcatcatcgga

SEQ ID NO: 943 - RNA, 22 nt, synthetic construct
  misc_feature 1..22: note = Synthetic
  source 1..22: mol_type = other RNA
gtaacaggactgcatcatcgga

SEQ ID NO: 944 - RNA, 23 nt, synthetic construct
  misc_feature 1..23: note = Synthetic
  source 1..23: mol_type = other RNA
taacaggactgcatcatcggaac

SEQ ID NO: 945 - RNA, 23 nt, synthetic construct
  misc_feature 1..23: note = Synthetic
  source 1..23: mol_type = other RNA
gtaacaggactgcatcatcggaa

SEQ ID NO: 946 - RNA, 24 nt, synthetic construct
  misc_feature 1..24: note = Synthetic
  source 1..24: mol_type = other RNA
caagcgatgaatgtgaatttggag

SEQ ID NO: 947 - RNA, 22 nt, synthetic construct
  misc_feature 1..22: note = Synthetic
  source 1..22: mol_type = other RNA
ggactgcatcatcggaaccttc

SEQ ID NO: 948 - RNA, 21 nt, synthetic construct
  misc_feature 1..21: note = Synthetic
  source 1..21: mol_type = other RNA
ggactgcatcatcggaacctt

SEQ ID NO: 949 - RNA, 24 nt, synthetic construct
  misc_feature 1..24: note = Synthetic
  source 1..24: mol_type = other RNA
tcgtcttgaaccctcccaagctcc

SEQ ID NO: 950 - RNA, 25 nt, synthetic construct
  misc_feature 1..25: note = Synthetic
  source 1..25: mol_type = other RNA
atcgtcttgaaccctcccaagctcc

SEQ ID NO: 951 - RNA, 22 nt, synthetic construct
  misc_feature 1..22: note = Synthetic
  source 1..22: mol_type = other RNA
caccaccccattattacagcca

SEQ ID NO: 952 - RNA, 23 nt, synthetic construct
  misc_feature 1..23: note = Synthetic
  source 1..23: mol_type = other RNA
tcaccaccccattattacagcca

SEQ ID NO: 953 - RNA, 22 nt, synthetic construct
  misc_feature 1..22: note = Synthetic
  source 1..22: mol_type = other RNA
tcaccaccccattattacagcc

SEQ ID NO: 954 - RNA, 20 nt, synthetic construct
  misc_feature 1..20: note = Synthetic
  source 1..20: mol_type = other RNA
ccatccagtttcaccacccc

SEQ ID NO: 955 - RNA, 24 nt, synthetic construct
  misc_feature 1..24: note = Synthetic
  source 1..24: mol_type = other RNA
tcaccaccccattattacagccaa

SEQ ID NO: 956 - RNA, 21 nt, synthetic construct
  misc_feature 1..21: note = Synthetic
  source 1..21: mol_type = other RNA
tccatccagtttcaccacccc

SEQ ID NO: 957 - RNA, 21 nt, synthetic construct
  misc_feature 1..21: note = Synthetic
  source 1..21: mol_type = other RNA
tcaccaccccattattacagc

SEQ ID NO: 958 - RNA, 21 nt, synthetic construct
  misc_feature 1..21: note = Synthetic
  source 1..21: mol_type = other RNA
ccatccagtttcaccacccca

SEQ ID NO: 959 - RNA, 25 nt, synthetic construct
  misc_feature 1..25: note = Synthetic
  source 1..25: mol_type = other RNA
tttcaccaccccattattacagcca

SEQ ID NO: 960 - RNA, 24 nt, synthetic construct
  misc_feature 1..24: note = Synthetic
  source 1..24: mol_type = other RNA
tttcaccaccccattattacagcc

SEQ ID NO: 961 - RNA, 20 nt, synthetic construct
  misc_feature 1..20: note = Synthetic
  source 1..20: mol_type = other RNA
catccagtttcaccacccca

SEQ ID NO: 962 - RNA, 22 nt, synthetic construct
  misc_feature 1..22: note = Synthetic
  source 1..22: mol_type = other RNA
tccatccagtttcaccacccca

SEQ ID NO: 963 - RNA, 24 nt, synthetic construct
  misc_feature 1..24: note = Synthetic
  source 1..24: mol_type = other RNA
ggaaatgcctgacttacttgccat

SEQ ID NO: 964 - RNA, 25 nt, synthetic construct
  misc_feature 1..25: note = Synthetic
  source 1..25: mol_type = other RNA
agtttcaccaccccattattacagc

SEQ ID NO: 965 - RNA, 21 nt, synthetic construct
  misc_feature 1..21: note = Synthetic
  source 1..21: mol_type = other RNA
catccagtttcaccaccccat

SEQ ID NO: 966 - RNA, 22 nt, synthetic construct
  misc_feature 1..22: note = Synthetic
  source 1..22: mol_type = other RNA
ccatccagtttcaccaccccat

SEQ ID NO: 967 - RNA, 23 nt, synthetic construct
  misc_feature 1..23: note = Synthetic
  source 1..23: mol_type = other RNA
gcggaaatgcctgacttacttgc

SEQ ID NO: 968 - RNA, 25 nt, synthetic construct
  misc_feature 1..25: note = Synthetic
  source 1..25: mol_type = other RNA
gtttcaccaccccattattacagcc

SEQ ID NO: 969 - RNA, 22 nt, synthetic construct
  misc_feature 1..22: note = Synthetic
  source 1..22: mol_type = other RNA
catccagtttcaccaccccatt

SEQ ID NO: 970 - RNA, 23 nt, synthetic construct
  misc_feature 1..23: note = Synthetic
  source 1..23: mol_type = other RNA
tccatccagtttcaccaccccat

SEQ ID NO: 971 - RNA, 25 nt, synthetic construct
  misc_feature 1..25: note = Synthetic
  source 1..25: mol_type = other RNA
gcggaaatgcctgacttacttgcca

SEQ ID NO: 972 - RNA, 23 nt, synthetic construct
  misc_feature 1..23: note = Synthetic
  source 1..23: mol_type = other RNA
tttcaccaccccattattacagc

SEQ ID NO: 973 - RNA, 23 nt, synthetic construct
  misc_feature 1..23: note = Synthetic
  source 1..23: mol_type = other RNA
catccagtttcaccaccccatta

SEQ ID NO: 974 - RNA, 24 nt, synthetic construct
  misc_feature 1..24: note = Synthetic
  source 1..24: mol_type = other RNA
ccatccagtttcaccaccccatta

SEQ ID NO: 975 - RNA, 23 nt, synthetic construct
  misc_feature 1..23: note = Synthetic
  source 1..23: mol_type = other RNA
ccatccagtttcaccaccccatt

SEQ ID NO: 976 - RNA, 23 nt, synthetic construct
  misc_feature 1..23: note = Synthetic
  source 1..23: mol_type = other RNA
gaaatgcctgacttacttgccat

SEQ ID NO: 977 - RNA, 24 nt, synthetic construct
  misc_feature 1..24: note = Synthetic
  source 1..24: mol_type = other RNA
gcggaaatgcctgacttacttgcc

SEQ ID NO: 978 - RNA, 25 nt, synthetic construct
  misc_feature 1..25: note = Synthetic
  source 1..25: mol_type = other RNA
agcggaaatgcctgacttacttgcc

SEQ ID NO: 979 - RNA, 24 nt, synthetic construct
  misc_feature 1..24: note = Synthetic
  source 1..24: mol_type = other RNA
tccatccagtttcaccaccccatt

SEQ ID NO: 980 - RNA, 20 nt, synthetic construct
  misc_feature 1..20: note = Synthetic
  source 1..20: mol_type = other RNA
tccatccagtttcaccaccc

SEQ ID NO: 981 - RNA, 24 nt, synthetic construct
  misc_feature 1..24: note = Synthetic
  source 1..24: mol_type = other RNA
catccagtttcaccaccccattat

SEQ ID NO: 982 - RNA, 25 nt, synthetic construct
  misc_feature 1..25: note = Synthetic
  source 1..25: mol_type = other RNA
ccatccagtttcaccaccccattat

SEQ ID NO: 983 - RNA, 25 nt, synthetic construct
  misc_feature 1..25: note = Synthetic
  source 1..25: mol_type = other RNA
tccatccagtttcaccaccccatta

SEQ ID NO: 984 - RNA, 24 nt, synthetic construct
  misc_feature 1..24: note = Synthetic
  source 1..24: mol_type = other RNA
gaaatgcctgacttacttgccatt

SEQ ID NO: 985 - RNA, 25 nt, synthetic construct
  misc_feature 1..25: note = Synthetic
  source 1..25: mol_type = other RNA
catccagtttcaccaccccattatt

SEQ ID NO: 986 - RNA, 25 nt, synthetic construct
  misc_feature 1..25: note = Synthetic
  source 1..25: mol_type = other RNA
ggaaatgcctgacttacttgccatt

SEQ ID NO: 987 - RNA, 23 nt, synthetic construct
  misc_feature 1..23: note = Synthetic
  source 1..23: mol_type = other RNA
ggaaatgcctgacttacttgcca

SEQ ID NO: 988 - RNA, 21 nt, synthetic construct
  misc_feature 1..21: note = Synthetic
  source 1..21: mol_type = other RNA
gtaacaggactgcatcatcgg

SEQ ID NO: 989 - RNA, 24 nt, synthetic construct
  misc_feature 1..24: note = Synthetic
  source 1..24: mol_type = other RNA
acaagcgatgaatgtgaatttgga

SEQ ID NO: 990 - RNA, 21 nt, synthetic construct
  misc_feature 1..21: note = Synthetic
  source 1..21: mol_type = other RNA
gtttcaccaccccattattac

SEQ ID NO: 991 - RNA, 24 nt, synthetic construct
  misc_feature 1..24: note = Synthetic
  source 1..24: mol_type = other RNA
gtttcaccaccccattattacagc

SEQ ID NO: 992 - RNA, 25 nt, synthetic construct
  misc_feature 1..25: note = Synthetic
  source 1..25: mol_type = other RNA
gtaatctatgagtttcttccaaagc

SEQ ID NO: 993 - RNA, 25 nt, synthetic construct
  misc_feature 1..25: note = Synthetic
  source 1..25: mol_type = other RNA
gcagtaatctatgagtttcttccaa

SEQ ID NO: 994 - RNA, 24 nt, synthetic construct
  misc_feature 1..24: note = Synthetic
  source 1..24: mol_type = other RNA
gcagtaatctatgagtttcttcca

SEQ ID NO: 995 - RNA, 25 nt, synthetic construct
  misc_feature 1..25: note = Synthetic
  source 1..25: mol_type = other RNA
tgcagtaatctatgagtttcttcca

SEQ ID NO: 996 - RNA, 23 nt, synthetic construct
  misc_feature 1..23: note = Synthetic
  source 1..23: mol_type = other RNA
gcagtaatctatgagtttcttcc

SEQ ID NO: 997 - RNA, 23 nt, synthetic construct
  misc_feature 1..23: note = Synthetic
  source 1..23: mol_type = other RNA
tgcagtaatctatgagtttcttc

SEQ ID NO: 998 - RNA, 22 nt, synthetic construct
  misc_feature 1..22: note = Synthetic
  source 1..22: mol_type = other RNA
tgtaggacattggcagttgttt

SEQ ID NO: 999 - RNA, 23 nt, synthetic construct
  misc_feature 1..23: note = Synthetic
  source 1..23: mol_type = other RNA
ctgtaggacattggcagttgttt

SEQ ID NO: 1000 - RNA, 20 nt, synthetic construct
  misc_feature 1..20: note = Synthetic
  source 1..20: mol_type = other RNA
gtaggacattggcagttgtt

SEQ ID NO: 1001 - RNA, 21 nt, synthetic construct
  misc_feature 1..21: note = Synthetic
  source 1..21: mol_type = other RNA
tgtaggacattggcagttgtt

SEQ ID NO: 1002 - RNA, 20 nt, synthetic construct
  misc_feature 1..20: note = Synthetic
  source 1..20: mol_type = other RNA
ctgtaggacattggcagttg

SEQ ID NO: 1003 - RNA, 20 nt, synthetic construct
  misc_feature 1..20: note = Synthetic
  source 1..20: mol_type = other RNA
cctgtaggacattggcagtt

SEQ ID NO: 1004 - RNA, 22 nt, synthetic construct
  misc_feature 1..22: note = Synthetic
  source 1..22: mol_type = other RNA
ggattttttggctgttttcatc

SEQ ID NO: 1005 - RNA, 23 nt, synthetic construct
  misc_feature 1..23: note = Synthetic
  source 1..23: mol_type = other RNA
aggattttttggctgttttcatc

SEQ ID NO: 1006 - RNA, 24 nt, synthetic construct
  misc_feature 1..24: note = Synthetic
  source 1..24: mol_type = other RNA
caggattttttggctgttttcatc

SEQ ID NO: 1007 - RNA, 25 nt, synthetic construct
  misc_feature 1..25: note = Synthetic
  source 1..25: mol_type = other RNA
tcaggattttttggctgttttcatc

SEQ ID NO: 1008 - RNA, 25 nt, synthetic construct
  misc_feature 1..25: note = Synthetic
  source 1..25: mol_type = other RNA
ctcaggattttttggctgttttcat

SEQ ID NO: 1009 - RNA, 24 nt, synthetic construct
  misc_feature 1..24: note = Synthetic
  source 1..24: mol_type = other RNA
ctcaggattttttggctgttttca

SEQ ID NO: 1010 - RNA, 25 nt, synthetic construct
  misc_feature 1..25: note = Synthetic
  source 1..25: mol_type = other RNA
tctcaggattttttggctgttttca

SEQ ID NO: 1011 - RNA, 24 nt, synthetic construct
  misc_feature 1..24: note = Synthetic
  source 1..24: mol_type = other RNA
tctcaggattttttggctgttttc

SEQ ID NO: 1012 - RNA, 25 nt, synthetic construct
  misc_feature 1..25: note = Synthetic
  source 1..25: mol_type = other RNA
atctcaggattttttggctgttttc

SEQ ID NO: 1013 - RNA, 24 nt, synthetic construct
  misc_feature 1..24: note = Synthetic
  source 1..24: mol_type = other RNA
gatctcaggattttttggctgttt

SEQ ID NO: 1014 - RNA, 25 nt, synthetic construct
  misc_feature 1..25: note = Synthetic
  source 1..25: mol_type = other RNA
ggatctcaggattttttggctgttt

SEQ ID NO: 1015 - RNA, 24 nt, synthetic construct
  misc_feature 1..24: note = Synthetic
  source 1..24: mol_type = other RNA
ggatctcaggattttttggctgtt

SEQ ID NO: 1016 - RNA, 25 nt, synthetic construct
  misc_feature 1..25: note = Synthetic
  source 1..25: mol_type = other RNA
gggatctcaggattttttggctgtt

SEQ ID NO: 1017 - RNA, 21 nt, synthetic construct
  misc_feature 1..21: note = Synthetic
  source 1..21: mol_type = other RNA
gaaccttccagggatctcagg

SEQ ID NO: 1018 - RNA, 25 nt, synthetic construct
  misc_feature 1..25: note = Synthetic
  source 1..25: mol_type = other RNA
gttgcagtaatctatgagtttcttc

SEQ ID NO: 1019 - RNA, 24 nt, synthetic construct
  misc_feature 1..24: note = Synthetic
  source 1..24: mol_type = other RNA
gttgcagtaatctatgagtttctt

SEQ ID NO: 1020 - RNA, 25 nt, synthetic construct
  misc_feature 1..25: note = Synthetic
  source 1..25: mol_type = other RNA
tgttgcagtaatctatgagtttctt

SEQ ID NO: 1021 - RNA, 23 nt, synthetic construct
  misc_feature 1..23: note = Synthetic
  source 1..23: mol_type = other RNA
gttgcagtaatctatgagtttct

SEQ ID NO: 1022 - RNA, 22 nt, synthetic construct
  misc_feature 1..22: note = Synthetic
  source 1..22: mol_type = other RNA
gttgcagtaatctatgagtttc

SEQ ID NO: 1023 - RNA, 23 nt, synthetic construct
  misc_feature 1..23: note = Synthetic
  source 1..23: mol_type = other RNA
tgttgcagtaatctatgagtttc

SEQ ID NO: 1024 - RNA, 23 nt, synthetic construct
  misc_feature 1..23: note = Synthetic
  source 1..23: mol_type = other RNA
ctgttgcagtaatctatgagttt

SEQ ID NO: 1025 - RNA, 20 nt, synthetic construct
  misc_feature 1..20: note = Synthetic
  source 1..20: mol_type = other RNA
gttgcagtaatctatgagtt

SEQ ID NO: 1026 - RNA, 21 nt, synthetic construct
  misc_feature 1..21: note = Synthetic
  source 1..21: mol_type = other RNA
tgttgcagtaatctatgagtt

SEQ ID NO: 1027 - RNA, 22 nt, synthetic construct
  misc_feature 1..22: note = Synthetic
  source 1..22: mol_type = other RNA
ctgttgcagtaatctatgagtt

SEQ ID NO: 1028 - RNA, 20 nt, synthetic construct
  misc_feature 1..20: note = Synthetic
  source 1..20: mol_type = other RNA
tgttgcagtaatctatgagt

SEQ ID NO: 1029 - RNA, 21 nt, synthetic construct
  misc_feature 1..21: note = Synthetic
  source 1..21: mol_type = other RNA
ctgttgcagtaatctatgagt

SEQ ID NO: 1030 - RNA, 20 nt, synthetic construct
  misc_feature 1..20: note = Synthetic
  source 1..20: mol_type = other RNA
tggacttttctggtatcatc

SEQ ID NO: 1031 - RNA, 21 nt, synthetic construct
  misc_feature 1..21: note = Synthetic
  source 1..21: mol_type = other RNA
gtggacttttctggtatcatc

SEQ ID NO: 1032 - RNA, 22 nt, synthetic construct
  misc_feature 1..22: note = Synthetic
  source 1..22: mol_type = other RNA
tgtggacttttctggtatcatc

SEQ ID NO: 1033 - RNA, 24 nt, synthetic construct
  misc_feature 1..24: note = Synthetic
  source 1..24: mol_type = other RNA
catgtggacttttctggtatcatc

SEQ ID NO: 1034 - RNA, 22 nt, synthetic construct
  misc_feature 1..22: note = Synthetic
  source 1..22: mol_type = other RNA
atgtggacttttctggtatcat

SEQ ID NO: 1035 - RNA, 23 nt, synthetic construct
  misc_feature 1..23: note = Synthetic
  source 1..23: mol_type = other RNA
catgtggacttttctggtatcat

SEQ ID NO: 1036 - RNA, 20 nt, synthetic construct
  misc_feature 1..20: note = Synthetic
  source 1..20: mol_type = other RNA
tgtggacttttctggtatca

SEQ ID NO: 1037 - RNA, 21 nt, synthetic construct
  misc_feature 1..21: note = Synthetic
  source 1..21: mol_type = other RNA
atgtggacttttctggtatca

SEQ ID NO: 1038 - RNA, 22 nt, synthetic construct
  misc_feature 1..22: note = Synthetic
  source 1..22: mol_type = other RNA
catgtggacttttctggtatca

SEQ ID NO: 1039 - RNA, 25 nt, synthetic construct
  misc_feature 1..25: note = Synthetic
  source 1..25: mol_type = other RNA
tatcatgtggacttttctggtatca

SEQ ID NO: 1040 - RNA, 20 nt, synthetic construct
  misc_feature 1..20: note = Synthetic
  source 1..20: mol_type = other RNA
atgtggacttttctggtatc

SEQ ID NO: 1041 - RNA, 21 nt, synthetic construct
  misc_feature 1..21: note = Synthetic
  source 1..21: mol_type = other RNA
catgtggacttttctggtatc

SEQ ID NO: 1042 - RNA, 24 nt, synthetic construct
  misc_feature 1..24: note = Synthetic
  source 1..24: mol_type = other RNA
tatcatgtggacttttctggtatc

SEQ ID NO: 1043 - RNA, 20 nt, synthetic construct
  misc_feature 1..20: note = Synthetic
  source 1..20: mol_type = other RNA
catgtggacttttctggtat

SEQ ID NO: 1044 - RNA, 23 nt, synthetic construct
  misc_feature 1..23: note = Synthetic
  source 1..23: mol_type = other RNA
tatcatgtggacttttctggtat

SEQ ID NO: 1045 - RNA, 24 nt, synthetic construct
  misc_feature 1..24: note = Synthetic
  source 1..24: mol_type = other RNA
ttatcatgtggacttttctggtat

SEQ ID NO: 1046 - RNA, 22 nt, synthetic construct
  misc_feature 1..22: note = Synthetic
  source 1..22: mol_type = other RNA
tatcatgtggacttttctggta

SEQ ID NO: 1047 - RNA, 21 nt, synthetic construct
  misc_feature 1..21: note = Synthetic
  source 1..21: mol_type = other RNA
tatcatgtggacttttctggt

SEQ ID NO: 1048 - RNA, 20 nt, synthetic construct
  misc_feature 1..20: note = Synthetic
  source 1..20: mol_type = other RNA
tatcatgtggacttttctgg

SEQ ID NO: 1049 - RNA, 20 nt, synthetic construct
  misc_feature 1..20: note = Synthetic
  source 1..20: mol_type = other RNA
ttatcatgtggacttttctg

SEQ ID NO: 1050 - RNA, 20 nt, synthetic construct
  misc_feature 1..20: note = Synthetic
  source 1..20: mol_type = other RNA
gttatcatgtggacttttct

SEQ ID NO: 1051 - RNA, 21 nt, synthetic construct
  misc_feature 1..21: note = Synthetic
  source 1..21: mol_type = other RNA
tgttatcatgtggacttttct

SEQ ID NO: 1052 - RNA, 22 nt, synthetic construct
  misc_feature 1..22: note = Synthetic
  source 1..22: mol_type = other RNA
ctgttatcatgtggacttttct

SEQ ID NO: 1053 - RNA, 20 nt, synthetic construct
  misc_feature 1..20: note = Synthetic
  source 1..20: mol_type = other RNA
tgttatcatgtggacttttc

SEQ ID NO: 1054 - RNA, 21 nt, synthetic construct
  misc_feature 1..21: note = Synthetic
  source 1..21: mol_type = other RNA
tctgttatcatgtggactttt

SEQ ID NO: 1055 - RNA, 20 nt, synthetic construct
  misc_feature 1..20: note = Synthetic
  source 1..20: mol_type = other RNA
tctgttatcatgtggacttt

SEQ ID NO: 1056 - RNA, 20 nt, synthetic construct
  misc_feature 1..20: note = Synthetic
  source 1..20: mol_type = other RNA
tctctgttatcatgtggact

SEQ ID NO: 1057 - RNA, 20 nt, synthetic construct
  misc_feature 1..20: note = Synthetic
  source 1..20: mol_type = other RNA
ttctctgttatcatgtggac

SEQ ID NO: 1058 - RNA, 21 nt, synthetic construct
  misc_feature 1..21: note = Synthetic
  source 1..21: mol_type = other RNA
attctctgttatcatgtggac

SEQ ID NO: 1059 - RNA, 22 nt, synthetic construct
  misc_feature 1..22: note = Synthetic
  source 1..22: mol_type = other RNA
tattctctgttatcatgtggac

SEQ ID NO: 1060 - RNA, 23 nt, synthetic construct
  misc_feature 1..23: note = Synthetic
  source 1..23: mol_type = other RNA
atattctctgttatcatgtggac

SEQ ID NO: 1061 - RNA, 20 nt, synthetic construct
  misc_feature 1..20: note = Synthetic
  source 1..20: mol_type = other RNA
tattctctgttatcatgtgg

SEQ ID NO: 1062 - RNA, 24 nt, synthetic construct
  misc_feature 1..24: note = Synthetic
  source 1..24: mol_type = other RNA
ttgcagtaatctatgagtttcttc

SEQ ID NO: 1063 - RNA, 25 nt, synthetic construct
  misc_feature 1..25: note = Synthetic
  source 1..25: mol_type = other RNA
ggacattggcagttgtttcagcttc

SEQ ID NO: 1064 - RNA, 24 nt, synthetic construct
  misc_feature 1..24: note = Synthetic
  source 1..24: mol_type = other RNA
ggacattggcagttgtttcagctt

SEQ ID NO: 1065 - RNA, 25 nt, synthetic construct
  misc_feature 1..25: note = Synthetic
  source 1..25: mol_type = other RNA
aggacattggcagttgtttcagctt

SEQ ID NO: 1066 - RNA, 22 nt, synthetic construct
  misc_feature 1..22: note = Synthetic
  source 1..22: mol_type = other RNA
gacattggcagttgtttcagct

SEQ ID NO: 1067 - RNA, 23 nt, synthetic construct
  misc_feature 1..23: note = Synthetic
  source 1..23: mol_type = other RNA
ggacattggcagttgtttcagct

SEQ ID NO: 1068 - RNA, 24 nt, synthetic construct
  misc_feature 1..24: note = Synthetic
  source 1..24: mol_type = other RNA
aggacattggcagttgtttcagct

SEQ ID NO: 1069 - RNA, 25 nt, synthetic construct
  misc_feature 1..25: note = Synthetic
  source 1..25: mol_type = other RNA
taggacattggcagttgtttcagct

SEQ ID NO: 1070 - RNA, 21 nt, synthetic construct
  misc_feature 1..21: note = Synthetic
  source 1..21: mol_type = other RNA
gacattggcagttgtttcagc

SEQ ID NO: 1071 - RNA, 22 nt, synthetic construct
  misc_feature 1..22: note = Synthetic
  source 1..22: mol_type = other RNA
ggacattggcagttgtttcagc

SEQ ID NO: 1072 - RNA, 23 nt, synthetic construct
  misc_feature 1..23: note = Synthetic
  source 1..23: mol_type = other RNA
aggacattggcagttgtttcagc

SEQ ID NO: 1073 - RNA, 25 nt, synthetic construct
  misc_feature 1..25: note = Synthetic
  source 1..25: mol_type = other RNA
gcatcctgtaggacattggcagttg

SEQ ID NO: 1074 - RNA, 24 nt, synthetic construct
  misc_feature 1..24: note = Synthetic
  source 1..24: mol_type = other RNA
gcatcctgtaggacattggcagtt

SEQ ID NO: 1075 - RNA, 23 nt, synthetic construct
  misc_feature 1..23: note = Synthetic
  source 1..23: mol_type = other RNA
gcatcctgtaggacattggcagt

SEQ ID NO: 1076 - RNA, 20 nt, synthetic construct
  misc_feature 1..20: note = Synthetic
  source 1..20: mol_type = other RNA
atcctgtaggacattggcag

SEQ ID NO: 1077 - RNA, 22 nt, synthetic construct
  misc_feature 1..22: note = Synthetic
  source 1..22: mol_type = other RNA
gcatcctgtaggacattggcag

SEQ ID NO: 1078 - RNA, 21 nt, synthetic construct
  misc_feature 1..21: note = Synthetic
  source 1..21: mol_type = other RNA
gcatcctgtaggacattggca

SEQ ID NO: 1079 - RNA, 20 nt, synthetic construct
  misc_feature 1..20: note = Synthetic
  source 1..20: mol_type = other RNA
gcatcctgtaggacattggc

SEQ ID NO: 1080 - RNA, 20 nt, synthetic construct
  misc_feature 1..20: note = Synthetic
  source 1..20: mol_type = other RNA
agcatcctgtaggacattgg

SEQ ID NO: 1081 - RNA, 23 nt, synthetic construct
  misc_feature 1..23: note = Synthetic
  source 1..23: mol_type = other RNA
cttgccattgtttcatcagctct

SEQ ID NO: 1082 - RNA, 24 nt, synthetic construct
  misc_feature 1..24: note = Synthetic
  source 1..24: mol_type = other RNA
acttgccattgtttcatcagctct

SEQ ID NO: 1083 - RNA, 25 nt, synthetic construct
  misc_feature 1..25: note = Synthetic
  source 1..25: mol_type = other RNA
tacttgccattgtttcatcagctct

SEQ ID NO: 1084 - RNA, 23 nt, synthetic construct
  misc_feature 1..23: note = Synthetic
  source 1..23: mol_type = other RNA
acttgccattgtttcatcagctc

SEQ ID NO: 1085 - RNA, 24 nt, synthetic construct
  misc_feature 1..24: note = Synthetic
  source 1..24: mol_type = other RNA
tacttgccattgtttcatcagctc

SEQ ID NO: 1086 - RNA, 25 nt, synthetic construct
  misc_feature 1..25: note = Synthetic
  source 1..25: mol_type = other RNA
ttacttgccattgtttcatcagctc

SEQ ID NO: 1087 - RNA, 25 nt, synthetic construct
  misc_feature 1..25: note = Synthetic
  source 1..25: mol_type = other RNA
cttacttgccattgtttcatcagct

SEQ ID NO: 1088 - RNA, 24 nt, synthetic construct
  misc_feature 1..24: note = Synthetic
  source 1..24: mol_type = other RNA
cttacttgccattgtttcatcagc

SEQ ID NO: 1089 - RNA, 25 nt, synthetic construct
  misc_feature 1..25: note = Synthetic
  source 1..25: mol_type = other RNA
acttacttgccattgtttcatcagc

SEQ ID NO: 1090 - RNA, 24 nt, synthetic construct
  misc_feature 1..24: note = Synthetic
  source 1..24: mol_type = other RNA
acttacttgccattgtttcatcag

SEQ ID NO: 1091 - RNA, 25 nt, synthetic construct
  misc_feature 1..25: note = Synthetic
  source 1..25: mol_type = other RNA
ggctgttttcatccaggttgtgata

SEQ ID NO: 1092 - RNA, 24 nt, synthetic construct
  misc_feature 1..24: note = Synthetic
  source 1..24: mol_type = other RNA
ggctgttttcatccaggttgtgat

SEQ ID NO: 1093 - RNA, 25 nt, synthetic construct
  misc_feature 1..25: note = Synthetic
  source 1..25: mol_type = other RNA
tggctgttttcatccaggttgtgat

SEQ ID NO: 1094 - RNA, 23 nt, synthetic construct
  misc_feature 1..23: note = Synthetic
  source 1..23: mol_type = other RNA
ggctgttttcatccaggttgtga

SEQ ID NO: 1095 - RNA, 24 nt, synthetic construct
  misc_feature 1..24: note = Synthetic
  source 1..24: mol_type = other RNA
tggctgttttcatccaggttgtga

SEQ ID NO: 1096 - RNA, 25 nt, synthetic construct
  misc_feature 1..25: note = Synthetic
  source 1..25: mol_type = other RNA
ttggctgttttcatccaggttgtga

SEQ ID NO: 1097 - RNA, 25 nt, synthetic construct
  misc_feature 1..25: note = Synthetic
  source 1..25: mol_type = other RNA
tttggctgttttcatccaggttgtg

SEQ ID NO: 1098 - RNA, 25 nt, synthetic construct
  misc_feature 1..25: note = Synthetic
  source 1..25: mol_type = other RNA
ttttggctgttttcatccaggttgt

SEQ ID NO: 1099 - RNA, 22 nt, synthetic construct
  misc_feature 1..22: note = Synthetic
  source 1..22: mol_type = other RNA
gattttttggctgttttcatcc

SEQ ID NO: 1100 - RNA, 23 nt, synthetic construct
  misc_feature 1..23: note = Synthetic
  source 1..23: mol_type = other RNA
ggattttttggctgttttcatcc

SEQ ID NO: 1101 - RNA, 24 nt, synthetic construct
  misc_feature 1..24: note = Synthetic
  source 1..24: mol_type = other RNA
aggattttttggctgttttcatcc

SEQ ID NO: 1102 - RNA, 25 nt, synthetic construct
  misc_feature 1..25: note = Synthetic
  source 1..25: mol_type = other RNA
caggattttttggctgttttcatcc

SEQ ID NO: 1103 - RNA, 23 nt, synthetic construct
  misc_feature 1..23: note = Synthetic
  source 1..23: mol_type = other RNA
ggatctcaggattttttggctgt

SEQ ID NO: 1104 - RNA, 24 nt, synthetic construct
  misc_feature 1..24: note = Synthetic
  source 1..24: mol_type = other RNA
gggatctcaggattttttggctgt

SEQ ID NO: 1105 - RNA, 24 nt, synthetic construct
  misc_feature 1..24: note = Synthetic
  source 1..24: mol_type = other RNA
tcggaaccttccagggatctcagg

SEQ ID NO: 1106 - RNA, 25 nt, synthetic construct
  misc_feature 1..25: note = Synthetic
  source 1..25: mol_type = other RNA
atcggaaccttccagggatctcagg

SEQ ID NO: 1107 - RNA, 23 nt, synthetic construct
  misc_feature 1..23: note = Synthetic
  source 1..23: mol_type = other RNA
tcggaaccttccagggatctcag

SEQ ID NO: 1108 - RNA, 24 nt, synthetic construct
  misc_feature 1..24: note = Synthetic
  source 1..24: mol_type = other RNA
atcggaaccttccagggatctcag

SEQ ID NO: 1109 - RNA, 25 nt, synthetic construct
  misc_feature 1..25: note = Synthetic
  source 1..25: mol_type = other RNA
catcggaaccttccagggatctcag

SEQ ID NO: 1110 - RNA, 22 nt, synthetic construct
  misc_feature 1..22: note = Synthetic
  source 1..22: mol_type = other RNA
tcggaaccttccagggatctca

SEQ ID NO: 1111 - RNA, 23 nt, synthetic construct
  misc_feature 1..23: note = Synthetic
  source 1..23: mol_type = other RNA
atcggaaccttccagggatctca

SEQ ID NO: 1112 - RNA, 24 nt, synthetic construct
  misc_feature 1..24: note = Synthetic
  source 1..24: mol_type = other RNA
catcggaaccttccagggatctca

SEQ ID NO: 1113 - RNA, 25 nt, synthetic construct
  misc_feature 1..25: note = Synthetic
  source 1..25: mol_type = other RNA
tcatcggaaccttccagggatctca

SEQ ID NO: 1114 - RNA, 21 nt, synthetic construct
  misc_feature 1..21: note = Synthetic
  source 1..21: mol_type = other RNA
tcggaaccttccagggatctc

SEQ ID NO: 1115 - RNA, 22 nt, synthetic construct
  misc_feature 1..22: note = Synthetic
  source 1..22: mol_type = other RNA
atcggaaccttccagggatctc

SEQ ID NO: 1116 - RNA, 23 nt, synthetic construct
  misc_feature 1..23: note = Synthetic
  source 1..23: mol_type = other RNA
catcggaaccttccagggatctc

SEQ ID NO: 1117 - RNA, 24 nt, synthetic construct
  misc_feature 1..24: note = Synthetic
  source 1..24: mol_type = other RNA
tcatcggaaccttccagggatctc

SEQ ID NO: 1118 - RNA, 22 nt, synthetic construct
  misc_feature 1..22: note = Synthetic
  source 1..22: mol_type = other RNA
catcggaaccttccagggatct

SEQ ID NO: 1119 - RNA, 23 nt, synthetic construct
  misc_feature 1..23: note = Synthetic
  source 1..23: mol_type = other RNA
tcatcggaaccttccagggatct

SEQ ID NO: 1120 - RNA, 20 nt, synthetic construct
  misc_feature 1..20: note = Synthetic
  source 1..20: mol_type = other RNA
atcggaaccttccagggatc

SEQ ID NO: 1121 - RNA, 21 nt, synthetic construct
  misc_feature 1..21: note = Synthetic
  source 1..21: mol_type = other RNA
catcggaaccttccagggatc

SEQ ID NO: 1122 - RNA, 22 nt, synthetic construct
  misc_feature 1..22: note = Synthetic
  source 1..22: mol_type = other RNA
tcatcggaaccttccagggatc

SEQ ID NO: 1123 - RNA, 21 nt, synthetic construct
  misc_feature 1..21: note = Synthetic
  source 1..21: mol_type = other RNA
tcatcggaaccttccagggat

SEQ ID NO: 1124 - RNA, 20 nt, synthetic construct
  misc_feature 1..20: note = Synthetic
  source 1..20: mol_type = other RNA
tcatcggaaccttccaggga

SEQ ID NO: 1125 - RNA, 21 nt, synthetic construct
  misc_feature 1..21: note = Synthetic
  source 1..21: mol_type = other RNA
tggacttttctggtatcatct

SEQ ID NO: 1126 - RNA, 22 nt, synthetic construct
  misc_feature 1..22: note = Synthetic
  source 1..22: mol_type = other RNA
gtggacttttctggtatcatct

SEQ ID NO: 1127 - RNA, 25 nt, synthetic construct
  misc_feature 1..25: note = Synthetic
  source 1..25: mol_type = other RNA
catgtggacttttctggtatcatct

SEQ ID NO: 1128 - RNA, 23 nt, synthetic construct
  misc_feature 1..23: note = Synthetic
  source 1..23: mol_type = other RNA
gatattctctgttatcatgtgga

SEQ ID NO: 1129 - RNA, 21 nt, synthetic construct
  misc_feature 1..21: note = Synthetic
  source 1..21: mol_type = other RNA
ggacattggcagttgtttcag

SEQ ID NO: 1130 - RNA, 22 nt, synthetic construct
  misc_feature 1..22: note = Synthetic
  source 1..22: mol_type = other RNA
aggacattggcagttgtttcag

SEQ ID NO: 1131 - RNA, 23 nt, synthetic construct
  misc_feature 1..23: note = Synthetic
  source 1..23: mol_type = other RNA
taggacattggcagttgtttcag

SEQ ID NO: 1132 - RNA, 20 nt, synthetic construct
  misc_feature 1..20: note = Synthetic
  source 1..20: mol_type = other RNA
catcctgtaggacattggca

SEQ ID NO: 1133 - RNA, 21 nt, synthetic construct
  misc_feature 1..21: note = Synthetic
  source 1..21: mol_type = other RNA
tagcatcctgtaggacattgg

SEQ ID NO: 1134 - RNA, 23 nt, synthetic construct
  misc_feature 1..23: note = Synthetic
  source 1..23: mol_type = other RNA
ggtagcatcctgtaggacattgg

SEQ ID NO: 1135 - RNA, 24 nt, synthetic construct
  misc_feature 1..24: note = Synthetic
  source 1..24: mol_type = other RNA
atcagctcttttactcccttggag

SEQ ID NO: 1136 - RNA, 22 nt, synthetic construct
  misc_feature 1..22: note = Synthetic
  source 1..22: mol_type = other RNA
tcagctcttttactcccttgga

SEQ ID NO: 1137 - RNA, 23 nt, synthetic construct
  misc_feature 1..23: note = Synthetic
  source 1..23: mol_type = other RNA
atcagctcttttactcccttgga

SEQ ID NO: 1138 - RNA, 20 nt, synthetic construct
  misc_feature 1..20: note = Synthetic
  source 1..20: mol_type = other RNA
cagctcttttactcccttgg

SEQ ID NO: 1139 - RNA, 25 nt, synthetic construct
  misc_feature 1..25: note = Synthetic
  source 1..25: mol_type = other RNA
ttcatcagctcttttactcccttgg

SEQ ID NO: 1140 - RNA, 22 nt, synthetic construct
  misc_feature 1..22: note = Synthetic
  source 1..22: mol_type = other RNA
catcagctcttttactcccttg

SEQ ID NO: 1141 - RNA, 25 nt, synthetic construct
  misc_feature 1..25: note = Synthetic
  source 1..25: mol_type = other RNA
tttcatcagctcttttactcccttg

SEQ ID NO: 1142 - RNA, 21 nt, synthetic construct
  misc_feature 1..21: note = Synthetic
  source 1..21: mol_type = other RNA
tcatcagctcttttactccct

SEQ ID NO: 1143 - RNA, 22 nt, synthetic construct
  misc_feature 1..22: note = Synthetic
  source 1..22: mol_type = other RNA
ttcatcagctcttttactccct

SEQ ID NO: 1144 - RNA, 23 nt, synthetic construct
  misc_feature 1..23: note = Synthetic
  source 1..23: mol_type = other RNA
ttgccattgtttcatcagctctt

SEQ ID NO: 1145 - RNA, 24 nt, synthetic construct
  misc_feature 1..24: note = Synthetic
  source 1..24: mol_type = other RNA
cttgccattgtttcatcagctctt

SEQ ID NO: 1146 - RNA, 25 nt, synthetic construct
  misc_feature 1..25: note = Synthetic
  source 1..25: mol_type = other RNA
acttgccattgtttcatcagctctt

SEQ ID NO: 1147 - RNA, 22 nt, synthetic construct
  misc_feature 1..22: note = Synthetic
  source 1..22: mol_type = other RNA
gacttacttgccattgtttcat

SEQ ID NO: 1148 - RNA, 25 nt, synthetic construct
  misc_feature 1..25: note = Synthetic
  source 1..25: mol_type = other RNA
gtgtgagcttcaatttcaccttgga

SEQ ID NO: 1149 - RNA, 24 nt, synthetic construct
  misc_feature 1..24: note = Synthetic
  source 1..24: mol_type = other RNA
gtgtgagcttcaatttcaccttgg

SEQ ID NO: 1150 - RNA, 25 nt, synthetic construct
  misc_feature 1..25: note = Synthetic
  source 1..25: mol_type = other RNA
tgtgtgagcttcaatttcaccttgg

SEQ ID NO: 1151 - RNA, 25 nt, synthetic construct
  misc_feature 1..25: note = Synthetic
  source 1..25: mol_type = other RNA
ctgtgtgagcttcaatttcaccttg

SEQ ID NO: 1152 - RNA, 25 nt, synthetic construct
  misc_feature 1..25: note = Synthetic
  source 1..25: mol_type = other RNA
tctgtgtgagcttcaatttcacctt

SEQ ID NO: 1153 - RNA, 24 nt, synthetic construct
  misc_feature 1..24: note = Synthetic
  source 1..24: mol_type = other RNA
tctgtgtgagcttcaatttcacct

SEQ ID NO: 1154 - RNA, 25 nt, synthetic construct
  misc_feature 1..25: note = Synthetic
  source 1..25: mol_type = other RNA
atctgtgtgagcttcaatttcacct

SEQ ID NO: 1155 - RNA, 25 nt, synthetic construct
  misc_feature 1..25: note = Synthetic
  source 1..25: mol_type = other RNA
gctgttttcatccaggttgtgataa

SEQ ID NO: 1156 - RNA, 24 nt, synthetic construct
  misc_feature 1..24: note = Synthetic
  source 1..24: mol_type = other RNA
ggattttttggctgttttcatcca

SEQ ID NO: 1157 - RNA, 25 nt, synthetic construct
  misc_feature 1..25: note = Synthetic
  source 1..25: mol_type = other RNA
aggattttttggctgttttcatcca

SEQ ID NO: 1158 - RNA, 23 nt, synthetic construct
  misc_feature 1..23: note = Synthetic
  source 1..23: mol_type = other RNA
cggaaccttccagggatctcagg

SEQ ID NO: 1159 - RNA, 22 nt, synthetic construct
  misc_feature 1..22: note = Synthetic
  source 1..22: mol_type = other RNA
cggaaccttccagggatctcag

SEQ ID NO: 1160 - RNA, 25 nt, synthetic construct
  misc_feature 1..25: note = Synthetic
  source 1..25: mol_type = other RNA
atcatcggaaccttccagggatctc

SEQ ID NO: 1161 - RNA, 24 nt, synthetic construct
  misc_feature 1..24: note = Synthetic
  source 1..24: mol_type = other RNA
atcatcggaaccttccagggatct

SEQ ID NO: 1162 - RNA, 23 nt, synthetic construct
  misc_feature 1..23: note = Synthetic
  source 1..23: mol_type = other RNA
atcatcggaaccttccagggatc

SEQ ID NO: 1163 - RNA, 25 nt, synthetic construct
  misc_feature 1..25: note = Synthetic
  source 1..25: mol_type = other RNA
gcatcatcggaaccttccagggatc

SEQ ID NO: 1164 - RNA, 22 nt, synthetic construct
  misc_feature 1..22: note = Synthetic
  source 1..22: mol_type = other RNA
atcatcggaaccttccagggat

SEQ ID NO: 1165 - RNA, 24 nt, synthetic construct
  misc_feature 1..24: note = Synthetic
  source 1..24: mol_type = other RNA
gcatcatcggaaccttccagggat

SEQ ID NO: 1166 - RNA, 25 nt, synthetic construct
  misc_feature 1..25: note = Synthetic
  source 1..25: mol_type = other RNA
tgcatcatcggaaccttccagggat

SEQ ID NO: 1167 - RNA, 21 nt, synthetic construct
  misc_feature 1..21: note = Synthetic
  source 1..21: mol_type = other RNA
atcatcggaaccttccaggga

SEQ ID NO: 1168 - RNA, 23 nt, synthetic construct
  misc_feature 1..23: note = Synthetic
  source 1..23: mol_type = other RNA
gcatcatcggaaccttccaggga

SEQ ID NO: 1169 - RNA, 24 nt, synthetic construct
  misc_feature 1..24: note = Synthetic
  source 1..24: mol_type = other RNA
tgcatcatcggaaccttccaggga

SEQ ID NO: 1170 - RNA, 22 nt, synthetic construct
  misc_feature 1..22: note = Synthetic
  source 1..22: mol_type = other RNA
gcatcatcggaaccttccaggg

SEQ ID NO: 1171 - RNA, 23 nt, synthetic construct
  misc_feature 1..23: note = Synthetic
  source 1..23: mol_type = other RNA
tgcatcatcggaaccttccaggg

SEQ ID NO: 1172 - RNA, 20 nt, synthetic construct
  misc_feature 1..20: note = Synthetic
  source 1..20: mol_type = other RNA
gcatcatcggaaccttccag

SEQ ID NO: 1173 - RNA, 21 nt, synthetic construct
  misc_feature 1..21: note = Synthetic
  source 1..21: mol_type = other RNA
tgcatcatcggaaccttccag

SEQ ID NO: 1174 - RNA, 20 nt, synthetic construct
  misc_feature 1..20: note = Synthetic
  source 1..20: mol_type = other RNA
tgcatcatcggaaccttcca

SEQ ID NO: 1175 - RNA, 25 nt, synthetic construct
  misc_feature 1..25: note = Synthetic
  source 1..25: mol_type = other RNA
gcagttgtttcagcttctgtaagcc

SEQ ID NO: 1176 - RNA, 22 nt, synthetic construct
  misc_feature 1..22: note = Synthetic
  source 1..22: mol_type = other RNA
tttcatcagctcttttactccc

SEQ ID NO: 1177 - RNA, 23 nt, synthetic construct
  misc_feature 1..23: note = Synthetic
  source 1..23: mol_type = other RNA
gtttcatcagctcttttactccc

SEQ ID NO: 1178 - RNA, 25 nt, synthetic construct
  misc_feature 1..25: note = Synthetic
  source 1..25: mol_type = other RNA
ttgccattgtttcatcagctctttt

SEQ ID NO: 1179 - RNA, 21 nt, synthetic construct
  misc_feature 1..21: note = Synthetic
  source 1..21: mol_type = other RNA
aggactgcatcatcggaacct

SEQ ID NO: 1180 - RNA, 22 nt, synthetic construct
  misc_feature 1..22: note = Synthetic
  source 1..22: mol_type = other RNA
caggactgcatcatcggaacct

SEQ ID NO: 1181 - RNA, 20 nt, synthetic construct
  misc_feature 1..20: note = Synthetic
  source 1..20: mol_type = other RNA
aggactgcatcatcggaacc

SEQ ID NO: 1182 - RNA, 21 nt, synthetic construct
  misc_feature 1..21: note = Synthetic
  source 1..21: mol_type = other RNA
caggactgcatcatcggaacc

SEQ ID NO: 1183 - RNA, 21 nt, synthetic construct
  misc_feature 1..21: note = Synthetic
  source 1..21: mol_type = other RNA
ggacttttctggtatcatctg

SEQ ID NO: 1184 - RNA, 22 nt, synthetic construct
  misc_feature 1..22: note = Synthetic
  source 1..22: mol_type = other RNA
tggacttttctggtatcatctg

SEQ ID NO: 1185 - RNA, 23 nt, synthetic construct
  misc_feature 1..23: note = Synthetic
  source 1..23: mol_type = other RNA
gtggacttttctggtatcatctg

SEQ ID NO: 1186 - RNA, 21 nt, synthetic construct
  misc_feature 1..21: note = Synthetic
  source 1..21: mol_type = other RNA
gtagcatcctgtaggacattg

SEQ ID NO: 1187 - RNA, 22 nt, synthetic construct
  misc_feature 1..22: note = Synthetic
  source 1..22: mol_type = other RNA
tcatcagctcttttactccctt

SEQ ID NO: 1188 - RNA, 23 nt, synthetic construct
  misc_feature 1..23: note = Synthetic
  source 1..23: mol_type = other RNA
ttcatcagctcttttactccctt

SEQ ID NO: 1189 - RNA, 24 nt, synthetic construct
  misc_feature 1..24: note = Synthetic
  source 1..24: mol_type = other RNA
tttcatcagctcttttactccctt

SEQ ID NO: 1190 - RNA, 25 nt, synthetic construct
  misc_feature 1..25: note = Synthetic
  source 1..25: mol_type = other RNA
gtttcatcagctcttttactccctt

SEQ ID NO: 1191 - RNA, 23 nt, synthetic construct
  misc_feature 1..23: note = Synthetic
  source 1..23: mol_type = other RNA
tgccattgtttcatcagctcttt

SEQ ID NO: 1192 - RNA, 24 nt, synthetic construct
  misc_feature 1..24: note = Synthetic
  source 1..24: mol_type = other RNA
ttgccattgtttcatcagctcttt

SEQ ID NO: 1193 - RNA, 25 nt, synthetic construct
  misc_feature 1..25: note = Synthetic
  source 1..25: mol_type = other RNA
cttgccattgtttcatcagctcttt

SEQ ID NO: 1194 - RNA, 23 nt, synthetic construct
  misc_feature 1..23: note = Synthetic
  source 1..23: mol_type = other RNA
tgacttacttgccattgtttcat

SEQ ID NO: 1195 - RNA, 24 nt, synthetic construct
  misc_feature 1..24: note = Synthetic
  source 1..24: mol_type = other RNA
gcaactattttgttttgtccctgg

SEQ ID NO: 1196 - RNA, 22 nt, synthetic construct
  misc_feature 1..22: note = Synthetic
  source 1..22: mol_type = other RNA
gaatgtgaatttggagaattgc

SEQ ID NO: 1197 - RNA, 22 nt, synthetic construct
  misc_feature 1..22: note = Synthetic
  source 1..22: mol_type = other RNA
tgaatgtgaatttggagaattg

SEQ ID NO: 1198 - RNA, 22 nt, synthetic construct
  misc_feature 1..22: note = Synthetic
  source 1..22: mol_type = other RNA
gatgaatgtgaatttggagaat

SEQ ID NO: 1199 - RNA, 25 nt, synthetic construct
  misc_feature 1..25: note = Synthetic
  source 1..25: mol_type = other RNA
catctgtgtgagcttcaatttcacc

SEQ ID NO: 1200 - RNA, 25 nt, synthetic construct
  misc_feature 1..25: note = Synthetic
  source 1..25: mol_type = other RNA
aggttgtgataaacatctgtgtgag

SEQ ID NO: 1201 - RNA, 21 nt, synthetic construct
  misc_feature 1..21: note = Synthetic
  source 1..21: mol_type = other RNA
ggctgttttcatccaggttgt

SEQ ID NO: 1202 - RNA, 22 nt, synthetic construct
  misc_feature 1..22: note = Synthetic
  source 1..22: mol_type = other RNA
tggctgttttcatccaggttgt

SEQ ID NO: 1203 - RNA, 23 nt, synthetic construct
  misc_feature 1..23: note = Synthetic
  source 1..23: mol_type = other RNA
ttggctgttttcatccaggttgt

SEQ ID NO: 1204 - RNA, 25 nt, synthetic construct
  misc_feature 1..25: note = Synthetic
  source 1..25: mol_type = other RNA
ggattttttggctgttttcatccag

SEQ ID NO: 1205 - RNA, 25 nt, synthetic construct
  misc_feature 1..25: note = Synthetic
  source 1..25: mol_type = other RNA
catcatcggaaccttccagggatct

SEQ ID NO: 1206 - RNA, 24 nt, synthetic construct
  misc_feature 1..24: note = Synthetic
  source 1..24: mol_type = other RNA
catcatcggaaccttccagggatc

SEQ ID NO: 1207 - RNA, 23 nt, synthetic construct
  misc_feature 1..23: note = Synthetic
  source 1..23: mol_type = other RNA
catcatcggaaccttccagggat

SEQ ID NO: 1208 - RNA, 22 nt, synthetic construct
  misc_feature 1..22: note = Synthetic
  source 1..22: mol_type = other RNA
catcatcggaaccttccaggga

SEQ ID NO: 1209 - RNA, 25 nt, synthetic construct
  misc_feature 1..25: note = Synthetic
  source 1..25: mol_type = other RNA
ctgcatcatcggaaccttccaggga

SEQ ID NO: 1210 - RNA, 21 nt, synthetic construct
  misc_feature 1..21: note = Synthetic
  source 1..21: mol_type = other RNA
catcatcggaaccttccaggg

SEQ ID NO: 1211 - RNA, 24 nt, synthetic construct
  misc_feature 1..24: note = Synthetic
  source 1..24: mol_type = other RNA
ctgcatcatcggaaccttccaggg

SEQ ID NO: 1212 - RNA, 22 nt, synthetic construct
  misc_feature 1..22: note = Synthetic
  source 1..22: mol_type = other RNA
ctgcatcatcggaaccttccag

SEQ ID NO: 1213 - RNA, 21 nt, synthetic construct
  misc_feature 1..21: note = Synthetic
  source 1..21: mol_type = other RNA
ctgcatcatcggaaccttcca

SEQ ID NO: 1214 - RNA, 25 nt, synthetic construct
  misc_feature 1..25: note = Synthetic
  source 1..25: mol_type = other RNA
gtctttgtaacaggactgcatcatc

SEQ ID NO: 1215 - RNA, 25 nt, synthetic construct
  misc_feature 1..25: note = Synthetic
  source 1..25: mol_type = other RNA
ggcagttgtttcagcttctgtaagc

SEQ ID NO: 1216 - RNA, 24 nt, synthetic construct
  misc_feature 1..24: note = Synthetic
  source 1..24: mol_type = other RNA
tgtttcatcagctcttttactccc

SEQ ID NO: 1217 - RNA, 25 nt, synthetic construct
  misc_feature 1..25: note = Synthetic
  source 1..25: mol_type = other RNA
cattgtttcatcagctcttttactc

SEQ ID NO: 1218 - RNA, 24 nt, synthetic construct
  misc_feature 1..24: note = Synthetic
  source 1..24: mol_type = other RNA
gccattgtttcatcagctctttta

SEQ ID NO: 1219 - RNA, 23 nt, synthetic construct
  misc_feature 1..23: note = Synthetic
  source 1..23: mol_type = other RNA
gctgagaattgttcaattggatc

SEQ ID NO: 1220 - RNA, 23 nt, synthetic construct
  misc_feature 1..23: note = Synthetic
  source 1..23: mol_type = other RNA
caggactgcatcatcggaacctt

SEQ ID NO: 1221 - RNA, 20 nt, synthetic construct
  misc_feature 1..20: note = Synthetic
  source 1..20: mol_type = other RNA
tcagctcttttactcccttg

SEQ ID NO: 1222 - RNA, 25 nt, synthetic construct
  misc_feature 1..25: note = Synthetic
  source 1..25: mol_type = other RNA
tgtttcatcagctcttttactccct

SEQ ID NO: 1223 - RNA, 25 nt, synthetic construct
  misc_feature 1..25: note = Synthetic
  source 1..25: mol_type = other RNA
gcaactattttgttttgtccctggc

SEQ ID NO: 1224 - RNA, 23 nt, synthetic construct
  misc_feature 1..23: note = Synthetic
  source 1..23: mol_type = other RNA
gaatgtgaatttggagaattgca

SEQ ID NO: 1225 - RNA, 23 nt, synthetic construct
  misc_feature 1..23: note = Synthetic
  source 1..23: mol_type = other RNA
tgaatgtgaatttggagaattgc

SEQ ID NO: 1226 - RNA, 23 nt, synthetic construct
  misc_feature 1..23: note = Synthetic
  source 1..23: mol_type = other RNA
gatgaatgtgaatttggagaatt

SEQ ID NO: 1227 - RNA, 23 nt, synthetic construct
  misc_feature 1..23: note = Synthetic
  source 1..23: mol_type = other RNA
cgatgaatgtgaatttggagaat

SEQ ID NO: 1228 - RNA, 22 nt, synthetic construct
  misc_feature 1..22: note = Synthetic
  source 1..22: mol_type = other RNA
cgatgaatgtgaatttggagaa

SEQ ID NO: 1229 - RNA, 21 nt, synthetic construct
  misc_feature 1..21: note = Synthetic
  source 1..21: mol_type = other RNA
cgatgaatgtgaatttggaga

SEQ ID NO: 1230 - RNA, 25 nt, synthetic construct
  misc_feature 1..25: note = Synthetic
  source 1..25: mol_type = other RNA
gaagaagaatatgtgcagaattacc

SEQ ID NO: 1231 - RNA, 25 nt, synthetic construct
  misc_feature 1..25: note = Synthetic
  source 1..25: mol_type = other RNA
ggttgtgataaacatctgtgtgagc

SEQ ID NO: 1232 - RNA, 21 nt, synthetic construct
  misc_feature 1..21: note = Synthetic
  source 1..21: mol_type = other RNA
ctgttttcatccaggttgtga

SEQ ID NO: 1233 - RNA, 22 nt, synthetic construct
  misc_feature 1..22: note = Synthetic
  source 1..22: mol_type = other RNA
ggctgttttcatccaggttgtg

SEQ ID NO: 1234 - RNA, 23 nt, synthetic construct
  misc_feature 1..23: note = Synthetic
  source 1..23: mol_type = other RNA
tggctgttttcatccaggttgtg

SEQ ID NO: 1235 - RNA, 24 nt, synthetic construct
  misc_feature 1..24: note = Synthetic
  source 1..24: mol_type = other RNA
ttggctgttttcatccaggttgtg

SEQ ID NO: 1236 - RNA, 24 nt, synthetic construct
  misc_feature 1..24: note = Synthetic
  source 1..24: mol_type = other RNA
tttggctgttttcatccaggttgt

SEQ ID NO: 1237 - RNA, 25 nt, synthetic construct
  misc_feature 1..25: note = Synthetic
  source 1..25: mol_type = other RNA
gattttttggctgttttcatccagg

SEQ ID NO: 1238 - RNA, 25 nt, synthetic construct
  misc_feature 1..25: note = Synthetic
  source 1..25: mol_type = other RNA
actgcatcatcggaaccttccaggg

SEQ ID NO: 1239 - RNA, 22 nt, synthetic construct
  misc_feature 1..22: note = Synthetic
  source 1..22: mol_type = other RNA
actgcatcatcggaaccttcca

SEQ ID NO: 1240 - RNA, 25 nt, synthetic construct
  misc_feature 1..25: note = Synthetic
  source 1..25: mol_type = other RNA
aggactgcatcatcggaaccttcca

SEQ ID NO: 1241 - RNA, 24 nt, synthetic construct
  misc_feature 1..24: note = Synthetic
  source 1..24: mol_type = other RNA
aggactgcatcatcggaaccttcc

SEQ ID NO: 1242 - RNA, 25 nt, synthetic construct
  misc_feature 1..25: note = Synthetic
  source 1..25: mol_type = other RNA
caggactgcatcatcggaaccttcc

SEQ ID NO: 1243 - RNA, 20 nt, synthetic construct
  misc_feature 1..20: note = Synthetic
  source 1..20: mol_type = other RNA
actgcatcatcggaaccttc

SEQ ID NO: 1244 - RNA, 25 nt, synthetic construct
  misc_feature 1..25: note = Synthetic
  source 1..25: mol_type = other RNA
tgtaacaggactgcatcatcggaac

SEQ ID NO: 1245 - RNA, 25 nt, synthetic construct
  misc_feature 1..25: note = Synthetic
  source 1..25: mol_type = other RNA
ttgtttcatcagctcttttactccc

SEQ ID NO: 1246 - RNA, 24 nt, synthetic construct
  misc_feature 1..24: note = Synthetic
  source 1..24: mol_type = other RNA
gctgagaattgttcaattggatcc

SEQ ID NO: 1247 - RNA, 24 nt, synthetic construct
  misc_feature 1..24: note = Synthetic
  source 1..24: mol_type = other RNA
caggactgcatcatcggaaccttc

SEQ ID NO: 1248 - RNA, 24 nt, synthetic construct
  misc_feature 1..24: note = Synthetic
  source 1..24: mol_type = other RNA
aacaggactgcatcatcggaacct

SEQ ID NO: 1249 - RNA, 23 nt, synthetic construct
  misc_feature 1..23: note = Synthetic
  source 1..23: mol_type = other RNA
aacaggactgcatcatcggaacc

SEQ ID NO: 1250 - RNA, 21 nt, synthetic construct
  misc_feature 1..21: note = Synthetic
  source 1..21: mol_type = other RNA
atcagctcttttactcccttg

SEQ ID NO: 1251 - RNA, 25 nt, synthetic construct
  misc_feature 1..25: note = Synthetic
  source 1..25: mol_type = other RNA
gttcaattggatccacaagagtgct

SEQ ID NO: 1252 - RNA, 21 nt, synthetic construct
  misc_feature 1..21: note = Synthetic
  source 1..21: mol_type = other RNA
ctattttgttttgtccctggc

SEQ ID NO: 1253 - RNA, 24 nt, synthetic construct
  misc_feature 1..24: note = Synthetic
  source 1..24: mol_type = other RNA
gaatgtgaatttggagaattgcaa

SEQ ID NO: 1254 - RNA, 24 nt, synthetic construct
  misc_feature 1..24: note = Synthetic
  source 1..24: mol_type = other RNA
tgaatgtgaatttggagaattgca

SEQ ID NO: 1255 - RNA, 24 nt, synthetic construct
  misc_feature 1..24: note = Synthetic
  source 1..24: mol_type = other RNA
atgaatgtgaatttggagaattgc

SEQ ID NO: 1256 - RNA, 24 nt, synthetic construct
  misc_feature 1..24: note = Synthetic
  source 1..24: mol_type = other RNA
gatgaatgtgaatttggagaattg

SEQ ID NO: 1257 - RNA, 24 nt, synthetic construct
  misc_feature 1..24: note = Synthetic
  source 1..24: mol_type = other RNA
cgatgaatgtgaatttggagaatt

SEQ ID NO: 1258 - RNA, 24 nt, synthetic construct
  misc_feature 1..24: note = Synthetic
  source 1..24: mol_type = other RNA
gcgatgaatgtgaatttggagaat

SEQ ID NO: 1259 - RNA, 23 nt, synthetic construct
  misc_feature 1..23: note = Synthetic
  source 1..23: mol_type = other RNA
gcgatgaatgtgaatttggagaa

SEQ ID NO: 1260 - RNA, 22 nt, synthetic construct
  misc_feature 1..22: note = Synthetic
  source 1..22: mol_type = other RNA
gcgatgaatgtgaatttggaga

SEQ ID NO: 1261 - RNA, 25 nt, synthetic construct
  misc_feature 1..25: note = Synthetic
  source 1..25: mol_type = other RNA
acatctgtgtgagcttcaatttcac

SEQ ID NO: 1262 - RNA, 23 nt, synthetic construct
  misc_feature 1..23: note = Synthetic
  source 1..23: mol_type = other RNA
ctgttttcatccaggttgtgata

SEQ ID NO: 1263 - RNA, 22 nt, synthetic construct
  misc_feature 1..22: note = Synthetic
  source 1..22: mol_type = other RNA
ctgttttcatccaggttgtgat

SEQ ID NO: 1264 - RNA, 25 nt, synthetic construct
  misc_feature 1..25: note = Synthetic
  source 1..25: mol_type = other RNA
gactgcatcatcggaaccttccagg

SEQ ID NO: 1265 - RNA, 24 nt, synthetic construct
  misc_feature 1..24: note = Synthetic
  source 1..24: mol_type = other RNA
gactgcatcatcggaaccttccag

SEQ ID NO: 1266 - RNA, 23 nt, synthetic construct
  misc_feature 1..23: note = Synthetic
  source 1..23: mol_type = other RNA
gactgcatcatcggaaccttcca

SEQ ID NO: 1267 - RNA, 22 nt, synthetic construct
  misc_feature 1..22: note = Synthetic
  source 1..22: mol_type = other RNA
gactgcatcatcggaaccttcc

SEQ ID NO: 1268 - RNA, 25 nt, synthetic construct
  misc_feature 1..25: note = Synthetic
  source 1..25: mol_type = other RNA
attgtttcatcagctcttttactcc

SEQ ID NO: 1269 - RNA, 22 nt, synthetic construct
  misc_feature 1..22: note = Synthetic
  source 1..22: mol_type = other RNA
gaattgttcaattggatccaca

SEQ ID NO: 1270 - RNA, 25 nt, synthetic construct
  misc_feature 1..25: note = Synthetic
  source 1..25: mol_type = other RNA
aacaggactgcatcatcggaacctt

SEQ ID NO: 1271 - RNA, 20 nt, synthetic construct
  misc_feature 1..20: note = Synthetic
  source 1..20: mol_type = other RNA
cagtttcaccaccccattat

SEQ ID NO: 1272 - RNA, 25 nt, synthetic construct
  misc_feature 1..25: note = Synthetic
  source 1..25: mol_type = other RNA
tgttcaattggatccacaagagtgc

SEQ ID NO: 1273 - RNA, 23 nt, synthetic construct
  misc_feature 1..23: note = Synthetic
  source 1..23: mol_type = other RNA
ctgagaattgttcaattggatcc

SEQ ID NO: 1274 - RNA, 22 nt, synthetic construct
  misc_feature 1..22: note = Synthetic
  source 1..22: mol_type = other RNA
actattttgttttgtccctggc

SEQ ID NO: 1275 - RNA, 25 nt, synthetic construct
  misc_feature 1..25: note = Synthetic
  source 1..25: mol_type = other RNA
gaatgtgaatttggagaattgcaaa

SEQ ID NO: 1276 - RNA, 25 nt, synthetic construct
  misc_feature 1..25: note = Synthetic
  source 1..25: mol_type = other RNA
tgaatgtgaatttggagaattgcaa

SEQ ID NO: 1277 - RNA, 25 nt, synthetic construct
  misc_feature 1..25: note = Synthetic
  source 1..25: mol_type = other RNA
atgaatgtgaatttggagaattgca

SEQ ID NO: 1278 - RNA, 25 nt, synthetic construct
  misc_feature 1..25: note = Synthetic
  source 1..25: mol_type = other RNA
gatgaatgtgaatttggagaattgc

SEQ ID NO: 1279 - RNA, 25 nt, synthetic construct
  misc_feature 1..25: note = Synthetic
  source 1..25: mol_type = other RNA
cgatgaatgtgaatttggagaattg

SEQ ID NO: 1280 - RNA, 25 nt, synthetic construct
  misc_feature 1..25: note = Synthetic
  source 1..25: mol_type = other RNA
gcgatgaatgtgaatttggagaatt

SEQ ID NO: 1281 - RNA, 25 nt, synthetic construct
  misc_feature 1..25: note = Synthetic
  source 1..25: mol_type = other RNA
agcgatgaatgtgaatttggagaat

SEQ ID NO: 1282 - RNA, 23 nt, synthetic construct
  misc_feature 1..23: note = Synthetic
  source 1..23: mol_type = other RNA
agcgatgaatgtgaatttggaga

SEQ ID NO: 1283 - RNA, 20 nt, synthetic construct
  misc_feature 1..20: note = Synthetic
  source 1..20: mol_type = other RNA
gcgatgaatgtgaatttgga

SEQ ID NO: 1284 - RNA, 24 nt, synthetic construct
  misc_feature 1..24: note = Synthetic
  source 1..24: mol_type = other RNA
ctgttttcatccaggttgtgataa

SEQ ID NO: 1285 - RNA, 24 nt, synthetic construct
  misc_feature 1..24: note = Synthetic
  source 1..24: mol_type = other RNA
gctgttttcatccaggttgtgata

SEQ ID NO: 1286 - RNA, 23 nt, synthetic construct
  misc_feature 1..23: note = Synthetic
  source 1..23: mol_type = other RNA
agaattgttcaattggatccaca

SEQ ID NO: 1287 - RNA, 21 nt, synthetic construct
  misc_feature 1..21: note = Synthetic
  source 1..21: mol_type = other RNA
gaattgttcaattggatccac

SEQ ID NO: 1288 - RNA, 23 nt, synthetic construct
  misc_feature 1..23: note = Synthetic
  source 1..23: mol_type = other RNA
atgctgagaattgttcaattgga

SEQ ID NO: 1289 - RNA, 21 nt, synthetic construct
  misc_feature 1..21: note = Synthetic
  source 1..21: mol_type = other RNA
actattttgttttgtccctgg

SEQ ID NO: 1290 - RNA, 21 nt, synthetic construct
  misc_feature 1..21: note = Synthetic
  source 1..21: mol_type = other RNA
cagtttcaccaccccattatt

SEQ ID NO: 1291 - RNA, 24 nt, synthetic construct
  misc_feature 1..24: note = Synthetic
  source 1..24: mol_type = other RNA
ctgagaattgttcaattggatcca

SEQ ID NO: 1292 - RNA, 23 nt, synthetic construct
  misc_feature 1..23: note = Synthetic
  source 1..23: mol_type = other RNA
actattttgttttgtccctggct

SEQ ID NO: 1293 - RNA, 23 nt, synthetic construct
  misc_feature 1..23: note = Synthetic
  source 1..23: mol_type = other RNA
aactattttgttttgtccctggc

SEQ ID NO: 1294 - RNA, 24 nt, synthetic construct
  misc_feature 1..24: note = Synthetic
  source 1..24: mol_type = other RNA
agcgatgaatgtgaatttggagaa

SEQ ID NO: 1295 - RNA, 24 nt, synthetic construct
  misc_feature 1..24: note = Synthetic
  source 1..24: mol_type = other RNA
aagcgatgaatgtgaatttggaga

SEQ ID NO: 1296 - RNA, 21 nt, synthetic construct
  misc_feature 1..21: note = Synthetic
  source 1..21: mol_type = other RNA
gcgatgaatgtgaatttggag

SEQ ID NO: 1297 - RNA, 21 nt, synthetic construct
  misc_feature 1..21: note = Synthetic
  source 1..21: mol_type = other RNA
agcgatgaatgtgaatttgga

SEQ ID NO: 1298 - RNA, 25 nt, synthetic construct
  misc_feature 1..25: note = Synthetic
  source 1..25: mol_type = other RNA
ggaagaagaatatgtgcagaattac

SEQ ID NO: 1299 - RNA, 25 nt, synthetic construct
  misc_feature 1..25: note = Synthetic
  source 1..25: mol_type = other RNA
ctgttttcatccaggttgtgataaa

SEQ ID NO: 1300 - RNA, 22 nt, synthetic construct
  misc_feature 1..22: note = Synthetic
  source 1..22: mol_type = other RNA
agaattgttcaattggatccac

SEQ ID NO: 1301 - RNA, 24 nt, synthetic construct
  misc_feature 1..24: note = Synthetic
  source 1..24: mol_type = other RNA
aatgctgagaattgttcaattgga

SEQ ID NO: 1302 - RNA, 22 nt, synthetic construct
  misc_feature 1..22: note = Synthetic
  source 1..22: mol_type = other RNA
aactattttgttttgtccctgg

SEQ ID NO: 1303 - RNA, 22 nt, synthetic construct
  misc_feature 1..22: note = Synthetic
  source 1..22: mol_type = other RNA
aagcgatgaatgtgaatttgga

SEQ ID NO: 1304 - RNA, 22 nt, synthetic construct
  misc_feature 1..22: note = Synthetic
  source 1..22: mol_type = other RNA
caagcgatgaatgtgaatttgg

SEQ ID NO: 1305 - RNA, 23 nt, synthetic construct
  misc_feature 1..23: note = Synthetic
  source 1..23: mol_type = other RNA
gaagaatatgtgcagaattacca

SEQ ID NO: 1306 - RNA, 25 nt, synthetic construct
  misc_feature 1..25: note = Synthetic
  source 1..25: mol_type = other RNA
ctgagaattgttcaattggatccac

SEQ ID NO: 1307 - RNA, 25 nt, synthetic construct
  misc_feature 1..25: note = Synthetic
  source 1..25: mol_type = other RNA
gctgagaattgttcaattggatcca

SEQ ID NO: 1308 - RNA, 21 nt, synthetic construct
  misc_feature 1..21: note = Synthetic
  source 1..21: mol_type = other RNA
gagaattgttcaattggatcc

SEQ ID NO: 1309 - RNA, 24 nt, synthetic construct
  misc_feature 1..24: note = Synthetic
  source 1..24: mol_type = other RNA
ctattttgttttgtccctggcttg

SEQ ID NO: 1310 - RNA, 24 nt, synthetic construct
  misc_feature 1..24: note = Synthetic
  source 1..24: mol_type = other RNA
actattttgttttgtccctggctt

SEQ ID NO: 1311 - RNA, 24 nt, synthetic construct
  misc_feature 1..24: note = Synthetic
  source 1..24: mol_type = other RNA
aactattttgttttgtccctggct

SEQ ID NO: 1312 - RNA, 24 nt, synthetic construct
  misc_feature 1..24: note = Synthetic
  source 1..24: mol_type = other RNA
caactattttgttttgtccctggc

SEQ ID NO: 1313 - RNA, 25 nt, synthetic construct
  misc_feature 1..25: note = Synthetic
  source 1..25: mol_type = other RNA
aagcgatgaatgtgaatttggagaa

SEQ ID NO: 1314 - RNA, 25 nt, synthetic construct
  misc_feature 1..25: note = Synthetic
  source 1..25: mol_type = other RNA
caagcgatgaatgtgaatttggaga

SEQ ID NO: 1315 - RNA, 22 nt, synthetic construct
  misc_feature 1..22: note = Synthetic
  source 1..22: mol_type = other RNA
agcgatgaatgtgaatttggag

SEQ ID NO: 1316 - RNA, 20 nt, synthetic construct
  misc_feature 1..20: note = Synthetic
  source 1..20: mol_type = other RNA
caggactgcatcatcggaac

SEQ ID NO: 1317 - RNA, 20 nt, synthetic construct
  misc_feature 1..20: note = Synthetic
  source 1..20: mol_type = other RNA
acaggactgcatcatcggaa

SEQ ID NO: 1318 - RNA, 20 nt, synthetic construct
  misc_feature 1..20: note = Synthetic
  source 1..20: mol_type = other RNA
aacaggactgcatcatcgga

SEQ ID NO: 1319 - RNA, 24 nt, synthetic construct
  misc_feature 1..24: note = Synthetic
  source 1..24: mol_type = other RNA
ttgtaacaggactgcatcatcgga

SEQ ID NO: 1320 - RNA, 25 nt, synthetic construct
  misc_feature 1..25: note = Synthetic
  source 1..25: mol_type = other RNA
tttgtaacaggactgcatcatcgga

SEQ ID NO: 1321 - RNA, 25 nt, synthetic construct
  misc_feature 1..25: note = Synthetic
  source 1..25: mol_type = other RNA
aaatgctgagaattgttcaattgga

SEQ ID NO: 1322 - RNA, 23 nt, synthetic construct
  misc_feature 1..23: note = Synthetic
  source 1..23: mol_type = other RNA
caactattttgttttgtccctgg

SEQ ID NO: 1323 - RNA, 23 nt, synthetic construct
  misc_feature 1..23: note = Synthetic
  source 1..23: mol_type = other RNA
aagcgatgaatgtgaatttggag

SEQ ID NO: 1324 - RNA, 23 nt, synthetic construct
  misc_feature 1..23: note = Synthetic
  source 1..23: mol_type = other RNA
caagcgatgaatgtgaatttgga

SEQ ID NO: 1325 - RNA, 24 nt, synthetic construct
  misc_feature 1..24: note = Synthetic
  source 1..24: mol_type = other RNA
gaagaatatgtgcagaattaccaa

SEQ ID NO: 1326 - RNA, 24 nt, synthetic construct
  misc_feature 1..24: note = Synthetic
  source 1..24: mol_type = other RNA
agaagaatatgtgcagaattacca

SEQ ID NO: 1327 - RNA, 20 nt, synthetic construct
  misc_feature 1..20: note = Synthetic
  source 1..20: mol_type = other RNA
gtttcaccaccccattatta

SEQ ID NO: 1328 - RNA, 22 nt, synthetic construct
  misc_feature 1..22: note = Synthetic
  source 1..22: mol_type = other RNA
gagaattgttcaattggatcca

SEQ ID NO: 1329 - RNA, 25 nt, synthetic construct
  misc_feature 1..25: note = Synthetic
  source 1..25: mol_type = other RNA
actattttgttttgtccctggcttg

SEQ ID NO: 1330 - RNA, 25 nt, synthetic construct
  misc_feature 1..25: note = Synthetic
  source 1..25: mol_type = other RNA
caactattttgttttgtccctggct

SEQ ID NO: 1331 - RNA, 21 nt, synthetic construct
  misc_feature 1..21: note = Synthetic
  source 1..21: mol_type = other RNA
aacaggactgcatcatcggaa

SEQ ID NO: 1332 - RNA, 25 nt, synthetic construct
  misc_feature 1..25: note = Synthetic
  source 1..25: mol_type = other RNA
gaagaatatgtgcagaattaccaaa

SEQ ID NO: 1333 - RNA, 25 nt, synthetic construct
  misc_feature 1..25: note = Synthetic
  source 1..25: mol_type = other RNA
agaagaatatgtgcagaattaccaa

SEQ ID NO: 1334 - RNA, 25 nt, synthetic construct
  misc_feature 1..25: note = Synthetic
  source 1..25: mol_type = other RNA
aagaagaatatgtgcagaattacca

SEQ ID NO: 1335 - RNA, 23 nt, synthetic construct
  misc_feature 1..23: note = Synthetic
  source 1..23: mol_type = other RNA
tgagaattgttcaattggatcca

SEQ ID NO: 1336 - RNA, 22 nt, synthetic construct
  misc_feature 1..22: note = Synthetic
  source 1..22: mol_type = other RNA
aacaggactgcatcatcggaac

SEQ ID NO: 1337 - RNA, 22 nt, synthetic construct
  misc_feature 1..22: note = Synthetic
  source 1..22: mol_type = other RNA
taacaggactgcatcatcggaa

SEQ ID NO: 1338 - RNA, 22 nt, synthetic construct
  misc_feature 1..22: note = Synthetic
  source 1..22: mol_type = other RNA
gaagaatatgtgcagaattacc

SEQ ID NO: 1339 - RNA, 23 nt, synthetic construct
  misc_feature 1..23: note = Synthetic
  source 1..23: mol_type = other RNA
tgtaacaggactgcatcatcgga

SEQ ID NO: 1340 - RNA, 23 nt, synthetic construct
  misc_feature 1..23: note = Synthetic
  source 1..23: mol_type = other RNA
agaagaatatgtgcagaattacc

SEQ ID NO: 1341 - RNA, 24 nt, synthetic construct
  misc_feature 1..24: note = Synthetic
  source 1..24: mol_type = other RNA
tgtaacaggactgcatcatcggaa

SEQ ID NO: 1342 - RNA, 24 nt, synthetic construct
  misc_feature 1..24: note = Synthetic
  source 1..24: mol_type = other RNA
gaagaagaatatgtgcagaattac

SEQ ID NO: 1343 - RNA, 25 nt, synthetic construct
  misc_feature 1..25: note = Synthetic
  source 1..25: mol_type = other RNA
gtacaaatgctgagaattgttcaat

SEQ ID NO: 1344 - RNA, 23 nt, synthetic construct
  misc_feature 1..23: note = Synthetic
  source 1..23: mol_type = other RNA
gctgttttcatccaggttgtgat

SEQ ID NO: 1345 - RNA, 22 nt, synthetic construct
  misc_feature 1..22: note = Synthetic
  source 1..22: mol_type = other RNA
gctgttttcatccaggttgtga

SEQ ID NO: 1346 - RNA, 21 nt, synthetic construct
  misc_feature 1..21: note = Synthetic
  source 1..21: mol_type = other RNA
gctgttttcatccaggttgtg

SEQ ID NO: 1347 - RNA, 21 nt, synthetic construct
  misc_feature 1..21: note = Synthetic
  source 1..21: mol_type = other RNA
gactgcatcatcggaaccttc

SEQ ID NO: 1348 - RNA, 23 nt, synthetic construct
  misc_feature 1..23: note = Synthetic
  source 1..23: mol_type = other RNA
aggactgcatcatcggaaccttc

SEQ ID NO: 1349 - RNA, 20 nt, synthetic construct
  misc_feature 1..20: note = Synthetic
  source 1..20: mol_type = other RNA
gactgcatcatcggaacctt

SEQ ID NO: 1350 - RNA, 22 nt, synthetic construct
  misc_feature 1..22: note = Synthetic
  source 1..22: mol_type = other RNA
aggactgcatcatcggaacctt

SEQ ID NO: 1351 - RNA, 23 nt, synthetic construct
  misc_feature 1..23: note = Synthetic
  source 1..23: mol_type = other RNA
cgtcttgaaccctcccaagctcc

SEQ ID NO: 1352 - RNA, 22 nt, synthetic construct
  misc_feature 1..22: note = Synthetic
  source 1..22: mol_type = other RNA
ggaaccttccagggatctcagg

SEQ ID NO: 1353 - RNA, 21 nt, synthetic construct
  misc_feature 1..21: note = Synthetic
  source 1..21: mol_type = other RNA
accaccccattattacagcca

SEQ ID NO: 1354 - RNA, 20 nt, synthetic construct
  misc_feature 1..20: note = Synthetic
  source 1..20: mol_type = other RNA
accaccccattattacagcc

SEQ ID NO: 1355 - RNA, 21 nt, synthetic construct
  misc_feature 1..21: note = Synthetic
  source 1..21: mol_type = other RNA
caccaccccattattacagcc

SEQ ID NO: 1356 - RNA, 22 nt, synthetic construct
  misc_feature 1..22: note = Synthetic
  source 1..22: mol_type = other RNA
accaccccattattacagccaa

SEQ ID NO: 1357 - RNA, 23 nt, synthetic construct
  misc_feature 1..23: note = Synthetic
  source 1..23: mol_type = other RNA
caccaccccattattacagccaa

SEQ ID NO: 1358 - RNA, 20 nt, synthetic construct
  misc_feature 1..20: note = Synthetic
  source 1..20: mol_type = other RNA
atgcctgacttacttgccat

SEQ ID NO: 1359 - RNA, 24 nt, synthetic construct
  misc_feature 1..24: note = Synthetic
  source 1..24: mol_type = other RNA
ttcaccaccccattattacagcca

SEQ ID NO: 1360 - RNA, 23 nt, synthetic construct
  misc_feature 1..23: note = Synthetic
  source 1..23: mol_type = other RNA
ttcaccaccccattattacagcc

SEQ ID NO: 1361 - RNA, 20 nt, synthetic construct
  misc_feature 1..20: note = Synthetic
  source 1..20: mol_type = other RNA
caccaccccattattacagc

SEQ ID NO: 1362 - RNA, 22 nt, synthetic construct
  misc_feature 1..22: note = Synthetic
  source 1..22: mol_type = other RNA
gtcttgaaccctcccaagctcc

SEQ ID NO: 1363 - RNA, 20 nt, synthetic construct
  misc_feature 1..20: note = Synthetic
  source 1..20: mol_type = other RNA
gtgcacctagtgaactccat

SEQ ID NO: 1364 - RNA, 21 nt, synthetic construct
  misc_feature 1..21: note = Synthetic
  source 1..21: mol_type = other RNA
atgcctgacttacttgccatt

SEQ ID NO: 1365 - RNA, 21 nt, synthetic construct
  misc_feature 1..21: note = Synthetic
  source 1..21: mol_type = other RNA
aatgcctgacttacttgccat

SEQ ID NO: 1366 - RNA, 25 nt, synthetic construct
  misc_feature 1..25: note = Synthetic
  source 1..25: mol_type = other RNA
ttcaccaccccattattacagccaa

SEQ ID NO: 1367 - RNA, 20 nt, synthetic construct
  misc_feature 1..20: note = Synthetic
  source 1..20: mol_type = other RNA
ccagtttcaccaccccatta

SEQ ID NO: 1368 - RNA, 24 nt, synthetic construct
  misc_feature 1..24: note = Synthetic
  source 1..24: mol_type = other RNA
cggaaatgcctgacttacttgcca

SEQ ID NO: 1369 - RNA, 22 nt, synthetic construct
  misc_feature 1..22: note = Synthetic
  source 1..22: mol_type = other RNA
ttcaccaccccattattacagc

SEQ ID NO: 1370 - RNA, 22 nt, synthetic construct
  misc_feature 1..22: note = Synthetic
  source 1..22: mol_type = other RNA
aatgcctgacttacttgccatt

SEQ ID NO: 1371 - RNA, 22 nt, synthetic construct
  misc_feature 1..22: note = Synthetic
  source 1..22: mol_type = other RNA
aaatgcctgacttacttgccat

SEQ ID NO: 1372 - RNA, 24 nt, synthetic construct
  misc_feature 1..24: note = Synthetic
  source 1..24: mol_type = other RNA
agcggaaatgcctgacttacttgc

SEQ ID NO: 1373 - RNA, 21 nt, synthetic construct
  misc_feature 1..21: note = Synthetic
  source 1..21: mol_type = other RNA
ccagtttcaccaccccattat

SEQ ID NO: 1374 - RNA, 20 nt, synthetic construct
  misc_feature 1..20: note = Synthetic
  source 1..20: mol_type = other RNA
tgcctgacttacttgccatt

SEQ ID NO: 1375 - RNA, 25 nt, synthetic construct
  misc_feature 1..25: note = Synthetic
  source 1..25: mol_type = other RNA
cggaaatgcctgacttacttgccat

SEQ ID NO: 1376 - RNA, 25 nt, synthetic construct
  misc_feature 1..25: note = Synthetic
  source 1..25: mol_type = other RNA
tctttgtaacaggactgcatcatcg

SEQ ID NO: 1377 - RNA, 23 nt, synthetic construct
  misc_feature 1..23: note = Synthetic
  source 1..23: mol_type = other RNA
aaatgcctgacttacttgccatt

SEQ ID NO: 1378 - RNA, 21 nt, synthetic construct
  misc_feature 1..21: note = Synthetic
  source 1..21: mol_type = other RNA
ggaaatgcctgacttacttgc

SEQ ID NO: 1379 - RNA, 25 nt, synthetic construct
  misc_feature 1..25: note = Synthetic
  source 1..25: mol_type = other RNA
aagcggaaatgcctgacttacttgc

SEQ ID NO: 1380 - RNA, 23 nt, synthetic construct
  misc_feature 1..23: note = Synthetic
  source 1..23: mol_type = other RNA
agcggaaatgcctgacttacttg

SEQ ID NO: 1381 - RNA, 22 nt, synthetic construct
  misc_feature 1..22: note = Synthetic
  source 1..22: mol_type = other RNA
ccagtttcaccaccccattatt

SEQ ID NO: 1382 - RNA, 21 nt, synthetic construct
  misc_feature 1..21: note = Synthetic
  source 1..21: mol_type = other RNA
gaaatgcctgacttacttgcc

SEQ ID NO: 1383 - RNA, 25 nt, synthetic construct
  misc_feature 1..25: note = Synthetic
  source 1..25: mol_type = other RNA
ctttgtaacaggactgcatcatcgg

SEQ ID NO: 1384 - RNA, 22 nt, synthetic construct
  misc_feature 1..22: note = Synthetic
  source 1..22: mol_type = other RNA
cggaaatgcctgacttacttgc

SEQ ID NO: 1385 - RNA, 22 nt, synthetic construct
  misc_feature 1..22: note = Synthetic
  source 1..22: mol_type = other RNA
gcggaaatgcctgacttacttg

SEQ ID NO: 1386 - RNA, 23 nt, synthetic construct
  misc_feature 1..23: note = Synthetic
  source 1..23: mol_type = other RNA
gaatatgtgcagaattaccaaac

SEQ ID NO: 1387 - RNA, 23 nt, synthetic construct
  misc_feature 1..23: note = Synthetic
  source 1..23: mol_type = other RNA
ccagtttcaccaccccattatta

SEQ ID NO: 1388 - RNA, 22 nt, synthetic construct
  misc_feature 1..22: note = Synthetic
  source 1..22: mol_type = other RNA
gaaatgcctgacttacttgcca

SEQ ID NO: 1389 - RNA, 22 nt, synthetic construct
  misc_feature 1..22: note = Synthetic
  source 1..22: mol_type = other RNA
ggaaatgcctgacttacttgcc

SEQ ID NO: 1390 - RNA, 20 nt, synthetic construct
  misc_feature 1..20: note = Synthetic
  source 1..20: mol_type = other RNA
taacaggactgcatcatcgg

SEQ ID NO: 1391 - RNA, 20 nt, synthetic construct
  misc_feature 1..20: note = Synthetic
  source 1..20: mol_type = other RNA
gtaacaggactgcatcatcg

SEQ ID NO: 1392 - RNA, 23 nt, synthetic construct
  misc_feature 1..23: note = Synthetic
  source 1..23: mol_type = other RNA
acaagcgatgaatgtgaatttgg

SEQ ID NO: 1393 - RNA, 24 nt, synthetic construct
  misc_feature 1..24: note = Synthetic
  source 1..24: mol_type = other RNA
agaatatgtgcagaattaccaaac

SEQ ID NO: 1394 - RNA, 20 nt, synthetic construct
  misc_feature 1..20: note = Synthetic
  source 1..20: mol_type = other RNA
tttcaccaccccattattac

SEQ ID NO: 1395 - RNA, 23 nt, synthetic construct
  misc_feature 1..23: note = Synthetic
  source 1..23: mol_type = other RNA
cagtttcaccaccccattattac

SEQ ID NO: 1396 - RNA, 23 nt, synthetic construct
  misc_feature 1..23: note = Synthetic
  source 1..23: mol_type = other RNA
cggaaatgcctgacttacttgcc

SEQ ID NO: 1397 - RNA, 22 nt, synthetic construct
  misc_feature 1..22: note = Synthetic
  source 1..22: mol_type = other RNA
tgtaacaggactgcatcatcgg

SEQ ID NO: 1398 - RNA, 22 nt, synthetic construct
  misc_feature 1..22: note = Synthetic
  source 1..22: mol_type = other RNA
agtttcaccaccccattattac

SEQ ID NO: 1399 - RNA, 25 nt, synthetic construct
  misc_feature 1..25: note = Synthetic
  source 1..25: mol_type = other RNA
acaagcgatgaatgtgaatttggag

SEQ ID NO: 1400 - DNA, 24 bp, synthetic construct
  misc_feature 1..24: note = Synthetic
  source 1..24: mol_type = other DNA
tgcagtaatctatgagtttcttcc

SEQ ID NO: 1401 - DNA, 22 bp, synthetic construct
  misc_feature 1..22: note = Synthetic
  source 1..22: mol_type = other DNA
gtaggacattggcagttgtttc

SEQ ID NO: 1402 - DNA, 23 bp, synthetic construct
  misc_feature 1..23: note = Synthetic
  source 1..23: mol_type = other DNA
tgtaggacattggcagttgtttc

SEQ ID NO: 1403 - DNA, 24 bp, synthetic construct
  misc_feature 1..24: note = Synthetic
  source 1..24: mol_type = other DNA
ctgtaggacattggcagttgtttc

SEQ ID NO: 1404 - DNA, 25 bp, synthetic construct
  misc_feature 1..25: note = Synthetic
  source 1..25: mol_type = other DNA
cctgtaggacattggcagttgtttc

SEQ ID NO: 1405 - DNA, 24 bp, synthetic construct
  misc_feature 1..24: note = Synthetic
  source 1..24: mol_type = other DNA
cctgtaggacattggcagttgttt

SEQ ID NO: 1406 - DNA, 25 bp, synthetic construct
  misc_feature 1..25: note = Synthetic
  source 1..25: mol_type = other DNA
tcctgtaggacattggcagttgttt

SEQ ID NO: 1407 - DNA, 22 bp, synthetic construct
  misc_feature 1..22: note = Synthetic
  source 1..22: mol_type = other DNA
ctgtaggacattggcagttgtt

SEQ ID NO: 1408 - DNA, 23 bp, synthetic construct
  misc_feature 1..23: note = Synthetic
  source 1..23: mol_type = other DNA
cctgtaggacattggcagttgtt

SEQ ID NO: 1409 - DNA, 24 bp, synthetic construct
  misc_feature 1..24: note = Synthetic
  source 1..24: mol_type = other DNA
tcctgtaggacattggcagttgtt

SEQ ID NO: 1410 - DNA, 20 bp, synthetic construct
  misc_feature 1..20: note = Synthetic
  source 1..20: mol_type = other DNA
tgtaggacattggcagttgt

SEQ ID NO: 1411 - DNA, 21 bp, synthetic construct
  misc_feature 1..21: note = Synthetic
  source 1..21: mol_type = other DNA
ctgtaggacattggcagttgt

SEQ ID NO: 1412 - DNA, 22 bp, synthetic construct
  misc_feature 1..22: note = Synthetic
  source 1..22: mol_type = other DNA
cctgtaggacattggcagttgt

SEQ ID NO: 1413 - DNA, 23 bp, synthetic construct
  misc_feature 1..23: note = Synthetic
  source 1..23: mol_type = other DNA
tcctgtaggacattggcagttgt

SEQ ID NO: 1414 - DNA, 21 bp, synthetic construct
  misc_feature 1..21: note = Synthetic
  source 1..21: mol_type = other DNA
cctgtaggacattggcagttg

SEQ ID NO: 1415 - DNA, 22 bp, synthetic construct
  misc_feature 1..22: note = Synthetic
  source 1..22: mol_type = other DNA
tcctgtaggacattggcagttg

SEQ ID NO: 1416 - DNA, 21 bp, synthetic construct
  misc_feature 1..21: note = Synthetic
  source 1..21: mol_type = other DNA
tcctgtaggacattggcagtt

SEQ ID NO: 1417 - DNA, 20 bp, synthetic construct
  misc_feature 1..20: note = Synthetic
  source 1..20: mol_type = other DNA
tcctgtaggacattggcagt

SEQ ID NO: 1418 - DNA, 24 bp, synthetic construct
  misc_feature 1..24: note = Synthetic
  source 1..24: mol_type = other DNA
tgttgcagtaatctatgagtttct

SEQ ID NO: 1419 - DNA, 25 bp, synthetic construct
  misc_feature 1..25: note = Synthetic
  source 1..25: mol_type = other DNA
ctgttgcagtaatctatgagtttct

SEQ ID NO: 1420 - DNA, 24 bp, synthetic construct
  misc_feature 1..24: note = Synthetic
  source 1..24: mol_type = other DNA
ctgttgcagtaatctatgagtttc

SEQ ID NO: 1421 - DNA, 23 bp, synthetic construct
  misc_feature 1..23: note = Synthetic
  source 1..23: mol_type = other DNA
atgtggacttttctggtatcatc

SEQ ID NO: 1422 - DNA, 25 bp, synthetic construct
  misc_feature 1..25: note = Synthetic
  source 1..25: mol_type = other DNA
tcatgtggacttttctggtatcatc

SEQ ID NO: 1423 - DNA, 24 bp, synthetic construct
  misc_feature 1..24: note = Synthetic
  source 1..24: mol_type = other DNA
tcatgtggacttttctggtatcat

SEQ ID NO: 1424 - DNA, 25 bp, synthetic construct
  misc_feature 1..25: note = Synthetic
  source 1..25: mol_type = other DNA
atcatgtggacttttctggtatcat

SEQ ID NO: 1425 - DNA, 23 bp, synthetic construct
  misc_feature 1..23: note = Synthetic
  source 1..23: mol_type = other DNA
tcatgtggacttttctggtatca

SEQ ID NO: 1426 - DNA, 24 bp, synthetic construct
  misc_feature 1..24: note = Synthetic
  source 1..24: mol_type = other DNA
atcatgtggacttttctggtatca

SEQ ID NO: 1427 - DNA, 22 bp, synthetic construct
  misc_feature 1..22: note = Synthetic
  source 1..22: mol_type = other DNA
tcatgtggacttttctggtatc

SEQ ID NO: 1428 - DNA, 23 bp, synthetic construct
  misc_feature 1..23: note = Synthetic
  source 1..23: mol_type = other DNA
atcatgtggacttttctggtatc

SEQ ID NO: 1429 - DNA, 25 bp, synthetic construct
  misc_feature 1..25: note = Synthetic
  source 1..25: mol_type = other DNA
ttatcatgtggacttttctggtatc

SEQ ID NO: 1430 - DNA, 21 bp, synthetic construct
  misc_feature 1..21: note = Synthetic
  source 1..21: mol_type = other DNA
tcatgtggacttttctggtat

SEQ ID NO: 1431 - DNA, 22 bp, synthetic construct
  misc_feature 1..22: note = Synthetic
  source 1..22: mol_type = other DNA
atcatgtggacttttctggtat

SEQ ID NO: 1432 - DNA, 25 bp, synthetic construct
  misc_feature 1..25: note = Synthetic
  source 1..25: mol_type = other DNA
gttatcatgtggacttttctggtat

SEQ ID NO: 1433 - DNA, 20 bp, synthetic construct
  misc_feature 1..20: note = Synthetic
  source 1..20: mol_type = other DNA
tcatgtggacttttctggta

SEQ ID NO: 1434 - DNA, 21 bp, synthetic construct
  misc_feature 1..21: note = Synthetic
  source 1..21: mol_type = other DNA
atcatgtggacttttctggta

SEQ ID NO: 1435 - DNA, 23 bp, synthetic construct
  misc_feature 1..23: note = Synthetic
  source 1..23: mol_type = other DNA
ttatcatgtggacttttctggta

SEQ ID NO: 1436 - DNA, 24 bp, synthetic construct
  misc_feature 1..24: note = Synthetic
  source 1..24: mol_type = other DNA
gttatcatgtggacttttctggta

SEQ ID NO: 1437 - DNA, 25 bp, synthetic construct
  misc_feature 1..25: note = Synthetic
  source 1..25: mol_type = other DNA
tgttatcatgtggacttttctggta

SEQ ID NO: 1438 - DNA, 20 bp, synthetic construct
  misc_feature 1..20: note = Synthetic
  source 1..20: mol_type = other DNA
atcatgtggacttttctggt

SEQ ID NO: 1439 - DNA, 22 bp, synthetic construct
  misc_feature 1..22: note = Synthetic
  source 1..22: mol_type = other DNA
ttatcatgtggacttttctggt

SEQ ID NO: 1440 - DNA, 23 bp, synthetic construct
  misc_feature 1..23: note = Synthetic
  source 1..23: mol_type = other DNA
gttatcatgtggacttttctggt

SEQ ID NO: 1441 - DNA, 24 bp, synthetic construct
  misc_feature 1..24: note = Synthetic
  source 1..24: mol_type = other DNA
tgttatcatgtggacttttctggt

SEQ ID NO: 1442 - DNA, 25 bp, synthetic construct
  misc_feature 1..25: note = Synthetic
  source 1..25: mol_type = other DNA
ctgttatcatgtggacttttctggt

SEQ ID NO: 1443 - DNA, 21 bp, synthetic construct
  misc_feature 1..21: note = Synthetic
  source 1..21: mol_type = other DNA
ttatcatgtggacttttctgg

SEQ ID NO: 1444 - DNA, 22 bp, synthetic construct
  misc_feature 1..22: note = Synthetic
  source 1..22: mol_type = other DNA
gttatcatgtggacttttctgg

SEQ ID NO: 1445 - DNA, 23 bp, synthetic construct
  misc_feature 1..23: note = Synthetic
  source 1..23: mol_type = other DNA
tgttatcatgtggacttttctgg

SEQ ID NO: 1446 - DNA, 24 bp, synthetic construct
  misc_feature 1..24: note = Synthetic
  source 1..24: mol_type = other DNA
ctgttatcatgtggacttttctgg

SEQ ID NO: 1447 - DNA, 25 bp, synthetic construct
  misc_feature 1..25: note = Synthetic
  source 1..25: mol_type = other DNA
tctgttatcatgtggacttttctgg

SEQ ID NO: 1448 - DNA, 21 bp, synthetic construct
  misc_feature 1..21: note = Synthetic
  source 1..21: mol_type = other DNA
gttatcatgtggacttttctg

SEQ ID NO: 1449 - DNA, 22 bp, synthetic construct
  misc_feature 1..22: note = Synthetic
  source 1..22: mol_type = other DNA
tgttatcatgtggacttttctg

SEQ ID NO: 1450 - DNA, 23 bp, synthetic construct
  misc_feature 1..23: note = Synthetic
  source 1..23: mol_type = other DNA
ctgttatcatgtggacttttctg

SEQ ID NO: 1451 - DNA, 24 bp, synthetic construct
  misc_feature 1..24: note = Synthetic
  source 1..24: mol_type = other DNA
tctgttatcatgtggacttttctg

SEQ ID NO: 1452 - DNA, 25 bp, synthetic construct
  misc_feature 1..25: note = Synthetic
  source 1..25: mol_type = other DNA
ctctgttatcatgtggacttttctg

SEQ ID NO: 1453 - DNA, 23 bp, synthetic construct
  misc_feature 1..23: note = Synthetic
  source 1..23: mol_type = other DNA
tctgttatcatgtggacttttct

SEQ ID NO: 1454 - DNA, 24 bp, synthetic construct
  misc_feature 1..24: note = Synthetic
  source 1..24: mol_type = other DNA
ctctgttatcatgtggacttttct

SEQ ID NO: 1455 - DNA, 25 bp, synthetic construct
  misc_feature 1..25: note = Synthetic
  source 1..25: mol_type = other DNA
tctctgttatcatgtggacttttct

SEQ ID NO: 1456 - DNA, 21 bp, synthetic construct
  misc_feature 1..21: note = Synthetic
  source 1..21: mol_type = other DNA
ctgttatcatgtggacttttc

SEQ ID NO: 1457 - DNA, 22 bp, synthetic construct
  misc_feature 1..22: note = Synthetic
  source 1..22: mol_type = other DNA
tctgttatcatgtggacttttc

SEQ ID NO: 1458 - DNA, 23 bp, synthetic construct
  misc_feature 1..23: note = Synthetic
  source 1..23: mol_type = other DNA
ctctgttatcatgtggacttttc

SEQ ID NO: 1459 - DNA, 24 bp, synthetic construct
  misc_feature 1..24: note = Synthetic
  source 1..24: mol_type = other DNA
tctctgttatcatgtggacttttc

SEQ ID NO: 1460 - DNA, 25 bp, synthetic construct
  misc_feature 1..25: note = Synthetic
  source 1..25: mol_type = other DNA
ttctctgttatcatgtggacttttc

SEQ ID NO: 1461 - DNA, 22 bp, synthetic construct
  misc_feature 1..22: note = Synthetic
  source 1..22: mol_type = other DNA
ctctgttatcatgtggactttt

SEQ ID NO: 1462 - DNA, 23 bp, synthetic construct
  misc_feature 1..23: note = Synthetic
  source 1..23: mol_type = other DNA
tctctgttatcatgtggactttt

SEQ ID NO: 1463 - DNA, 24 bp, synthetic construct
  misc_feature 1..24: note = Synthetic
  source 1..24: mol_type = other DNA
ttctctgttatcatgtggactttt

SEQ ID NO: 1464 - DNA, 25 bp, synthetic construct
  misc_feature 1..25: note = Synthetic
  source 1..25: mol_type = other DNA
attctctgttatcatgtggactttt

SEQ ID NO: 1465 - DNA, 21 bp, synthetic construct
  misc_feature 1..21: note = Synthetic
  source 1..21: mol_type = other DNA
ctctgttatcatgtggacttt

SEQ ID NO: 1466 - DNA, 22 bp, synthetic construct
  misc_feature 1..22: note = Synthetic
  source 1..22: mol_type = other DNA
tctctgttatcatgtggacttt

SEQ ID NO: 1467 - DNA, 23 bp, synthetic construct
  misc_feature 1..23: note = Synthetic
  source 1..23: mol_type = other DNA
ttctctgttatcatgtggacttt

SEQ ID NO: 1468 - DNA, 24 bp, synthetic construct
  misc_feature 1..24: note = Synthetic
  source 1..24: mol_type = other DNA
attctctgttatcatgtggacttt

SEQ ID NO: 1469 - DNA, 25 bp, synthetic construct
  misc_feature 1..25: note = Synthetic
  source 1..25: mol_type = other DNA
tattctctgttatcatgtggacttt

SEQ ID NO: 1470 - DNA, 20 bp, synthetic construct
  misc_feature 1..20: note = Synthetic
  source 1..20: mol_type = other DNA
ctctgttatcatgtggactt

SEQ ID NO: 1471 - DNA, 21 bp, synthetic construct
  misc_feature 1..21: note = Synthetic
  source 1..21: mol_type = other DNA
tctctgttatcatgtggactt

SEQ ID NO: 1472 - DNA, 22 bp, synthetic construct
  misc_feature 1..22: note = Synthetic
  source 1..22: mol_type = other DNA
ttctctgttatcatgtggactt

SEQ ID NO: 1473 - DNA, 23 bp, synthetic construct
  misc_feature 1..23: note = Synthetic
  source 1..23: mol_type = other DNA
attctctgttatcatgtggactt

SEQ ID NO: 1474 - DNA, 24 bp, synthetic construct
  misc_feature 1..24: note = Synthetic
  source 1..24: mol_type = other DNA
tattctctgttatcatgtggactt

SEQ ID NO: 1475 - DNA, 25 bp, synthetic construct
  misc_feature 1..25: note = Synthetic
  source 1..25: mol_type = other DNA
atattctctgttatcatgtggactt

SEQ ID NO: 1476 - DNA, 21 bp, synthetic construct
  misc_feature 1..21: note = Synthetic
  source 1..21: mol_type = other DNA
ttctctgttatcatgtggact

SEQ ID NO: 1477 - DNA, 22 bp, synthetic construct
  misc_feature 1..22: note = Synthetic
  source 1..22: mol_type = other DNA
attctctgttatcatgtggact

SEQ ID NO: 1478 - DNA, 23 bp, synthetic construct
  misc_feature 1..23: note = Synthetic
  source 1..23: mol_type = other DNA
tattctctgttatcatgtggact

SEQ ID NO: 1479 - DNA, 24 bp, synthetic construct
  misc_feature 1..24: note = Synthetic
  source 1..24: mol_type = other DNA
atattctctgttatcatgtggact

SEQ ID NO: 1480 - DNA, 25 bp, synthetic construct
  misc_feature 1..25: note = Synthetic
  source 1..25: mol_type = other DNA
gatattctctgttatcatgtggact

SEQ ID NO: 1481 - DNA, 24 bp, synthetic construct
  misc_feature 1..24: note = Synthetic
  source 1..24: mol_type = other DNA
gatattctctgttatcatgtggac

SEQ ID NO: 1482 - DNA, 25 bp, synthetic construct
  misc_feature 1..25: note = Synthetic
  source 1..25: mol_type = other DNA
tgatattctctgttatcatgtggac

SEQ ID NO: 1483 - DNA, 25 bp, synthetic construct
  misc_feature 1..25: note = Synthetic
  source 1..25: mol_type = other DNA
ttgcagtaatctatgagtttcttcc

SEQ ID NO: 1484 - DNA, 24 bp, synthetic construct
  misc_feature 1..24: note = Synthetic
  source 1..24: mol_type = other DNA
taggacattggcagttgtttcagc

SEQ ID NO: 1485 - DNA, 25 bp, synthetic construct
  misc_feature 1..25: note = Synthetic
  source 1..25: mol_type = other DNA
gtaggacattggcagttgtttcagc

SEQ ID NO: 1486 - DNA, 23 bp, synthetic construct
  misc_feature 1..23: note = Synthetic
  source 1..23: mol_type = other DNA
gtaggacattggcagttgtttca

SEQ ID NO: 1487 - DNA, 24 bp, synthetic construct
  misc_feature 1..24: note = Synthetic
  source 1..24: mol_type = other DNA
tgtaggacattggcagttgtttca

SEQ ID NO: 1488 - DNA, 25 bp, synthetic construct
  misc_feature 1..25: note = Synthetic
  source 1..25: mol_type = other DNA
ctgtaggacattggcagttgtttca

SEQ ID NO: 1489 - DNA, 25 bp, synthetic construct
  misc_feature 1..25: note = Synthetic
  source 1..25: mol_type = other DNA
atcctgtaggacattggcagttgtt

SEQ ID NO: 1490 - DNA, 24 bp, synthetic construct
  misc_feature 1..24: note = Synthetic
  source 1..24: mol_type = other DNA
atcctgtaggacattggcagttgt

SEQ ID NO: 1491 - DNA, 23 bp, synthetic construct
  misc_feature 1..23: note = Synthetic
  source 1..23: mol_type = other DNA
atcctgtaggacattggcagttg

SEQ ID NO: 1492 - DNA, 22 bp, synthetic construct
  misc_feature 1..22: note = Synthetic
  source 1..22: mol_type = other DNA
atcctgtaggacattggcagtt

SEQ ID NO: 1493 - DNA, 25 bp, synthetic construct
  misc_feature 1..25: note = Synthetic
  source 1..25: mol_type = other DNA
agcatcctgtaggacattggcagtt

SEQ ID NO: 1494 - DNA, 21 bp, synthetic construct
  misc_feature 1..21: note = Synthetic
  source 1..21: mol_type = other DNA
atcctgtaggacattggcagt

SEQ ID NO: 1495 - DNA, 24 bp, synthetic construct
  misc_feature 1..24: note = Synthetic
  source 1..24: mol_type = other DNA
agcatcctgtaggacattggcagt

SEQ ID NO: 1496 - DNA, 23 bp, synthetic construct
  misc_feature 1..23: note = Synthetic
  source 1..23: mol_type = other DNA
agcatcctgtaggacattggcag

SEQ ID NO: 1497 - DNA, 22 bp, synthetic construct
  misc_feature 1..22: note = Synthetic
  source 1..22: mol_type = other DNA
agcatcctgtaggacattggca

SEQ ID NO: 1498 - DNA, 21 bp, synthetic construct
  misc_feature 1..21: note = Synthetic
  source 1..21: mol_type = other DNA
agcatcctgtaggacattggc

SEQ ID NO: 1499 - DNA, 20 bp, synthetic construct
  misc_feature 1..20: note = Synthetic
  source 1..20: mol_type = other DNA
ggacttttctggtatcatct

SEQ ID NO: 1500 - DNA, 23 bp, synthetic construct
  misc_feature 1..23: note = Synthetic
  source 1..23: mol_type = other DNA
tgtggacttttctggtatcatct

SEQ ID NO: 1501 - DNA, 24 bp, synthetic construct
  misc_feature 1..24: note = Synthetic
  source 1..24: mol_type = other DNA
atgtggacttttctggtatcatct

SEQ ID NO: 1502 - DNA, 24 bp, synthetic construct
  misc_feature 1..24: note = Synthetic
  source 1..24: mol_type = other DNA
gtaggacattggcagttgtttcag

SEQ ID NO: 1503 - DNA, 25 bp, synthetic construct
  misc_feature 1..25: note = Synthetic
  source 1..25: mol_type = other DNA
tgtaggacattggcagttgtttcag

SEQ ID NO: 1504 - DNA, 25 bp, synthetic construct
  misc_feature 1..25: note = Synthetic
  source 1..25: mol_type = other DNA
catcctgtaggacattggcagttgt

SEQ ID NO: 1505 - DNA, 24 bp, synthetic construct
  misc_feature 1..24: note = Synthetic
  source 1..24: mol_type = other DNA
catcctgtaggacattggcagttg

SEQ ID NO: 1506 - DNA, 23 bp, synthetic construct
  misc_feature 1..23: note = Synthetic
  source 1..23: mol_type = other DNA
catcctgtaggacattggcagtt

SEQ ID NO: 1507 - DNA, 22 bp, synthetic construct
  misc_feature 1..22: note = Synthetic
  source 1..22: mol_type = other DNA
catcctgtaggacattggcagt

SEQ ID NO: 1508 - DNA, 25 bp, synthetic construct
  misc_feature 1..25: note = Synthetic
  source 1..25: mol_type = other DNA
tagcatcctgtaggacattggcagt

SEQ ID NO: 1509 - DNA, 21 bp, synthetic construct
  misc_feature 1..21: note = Synthetic
  source 1..21: mol_type = other DNA
catcctgtaggacattggcag

SEQ ID NO: 1510 - DNA, 24 bp, synthetic construct
  misc_feature 1..24: note = Synthetic
  source 1..24: mol_type = other DNA
tagcatcctgtaggacattggcag

SEQ ID NO: 1511 - DNA, 23 bp, synthetic construct
  misc_feature 1..23: note = Synthetic
  source 1..23: mol_type = other DNA
tagcatcctgtaggacattggca

SEQ ID NO: 1512 - DNA, 25 bp, synthetic construct
  misc_feature 1..25: note = Synthetic
  source 1..25: mol_type = other DNA
ggtagcatcctgtaggacattggca

SEQ ID NO: 1513 - DNA, 22 bp, synthetic construct
  misc_feature 1..22: note = Synthetic
  source 1..22: mol_type = other DNA
tagcatcctgtaggacattggc

SEQ ID NO: 1514 - DNA, 24 bp, synthetic construct
  misc_feature 1..24: note = Synthetic
  source 1..24: mol_type = other DNA
ggtagcatcctgtaggacattggc

SEQ ID NO: 1515 - DNA, 21 bp, synthetic construct
  misc_feature 1..21: note = Synthetic
  source 1..21: mol_type = other DNA
tcagctcttttactcccttgg

SEQ ID NO: 1516 - DNA, 22 bp, synthetic construct
  misc_feature 1..22: note = Synthetic
  source 1..22: mol_type = other DNA
atcagctcttttactcccttgg

SEQ ID NO: 1517 - DNA, 23 bp, synthetic construct
  misc_feature 1..23: note = Synthetic
  source 1..23: mol_type = other DNA
catcagctcttttactcccttgg

SEQ ID NO: 1518 - DNA, 24 bp, synthetic construct
  misc_feature 1..24: note = Synthetic
  source 1..24: mol_type = other DNA
tcatcagctcttttactcccttgg

SEQ ID NO: 1519 - DNA, 23 bp, synthetic construct
  misc_feature 1..23: note = Synthetic
  source 1..23: mol_type = other DNA
tcatcagctcttttactcccttg

SEQ ID NO: 1520 - DNA, 24 bp, synthetic construct
  misc_feature 1..24: note = Synthetic
  source 1..24: mol_type = other DNA
ttcatcagctcttttactcccttg

SEQ ID NO: 1521 - DNA, 23 bp, synthetic construct
  misc_feature 1..23: note = Synthetic
  source 1..23: mol_type = other DNA
tttcatcagctcttttactccct

SEQ ID NO: 1522 - DNA, 25 bp, synthetic construct
  misc_feature 1..25: note = Synthetic
  source 1..25: mol_type = other DNA
gacttacttgccattgtttcatcag

SEQ ID NO: 1523 - DNA, 24 bp, synthetic construct
  misc_feature 1..24: note = Synthetic
  source 1..24: mol_type = other DNA
gacttacttgccattgtttcatca

SEQ ID NO: 1524 - DNA, 23 bp, synthetic construct
  misc_feature 1..23: note = Synthetic
  source 1..23: mol_type = other DNA
gacttacttgccattgtttcatc

SEQ ID NO: 1525 - DNA, 21 bp, synthetic construct
  misc_feature 1..21: note = Synthetic
  source 1..21: mol_type = other DNA
gcatcatcggaaccttccagg

SEQ ID NO: 1526 - DNA, 22 bp, synthetic construct
  misc_feature 1..22: note = Synthetic
  source 1..22: mol_type = other DNA
tgcatcatcggaaccttccagg

SEQ ID NO: 1527 - DNA, 24 bp, synthetic construct
  misc_feature 1..24: note = Synthetic
  source 1..24: mol_type = other DNA
tgtggacttttctggtatcatctg

SEQ ID NO: 1528 - DNA, 25 bp, synthetic construct
  misc_feature 1..25: note = Synthetic
  source 1..25: mol_type = other DNA
atgtggacttttctggtatcatctg

SEQ ID NO: 1529 - DNA, 25 bp, synthetic construct
  misc_feature 1..25: note = Synthetic
  source 1..25: mol_type = other DNA
gtagcatcctgtaggacattggcag

SEQ ID NO: 1530 - DNA, 24 bp, synthetic construct
  misc_feature 1..24: note = Synthetic
  source 1..24: mol_type = other DNA
gtagcatcctgtaggacattggca

SEQ ID NO: 1531 - DNA, 23 bp, synthetic construct
  misc_feature 1..23: note = Synthetic
  source 1..23: mol_type = other DNA
gtagcatcctgtaggacattggc

SEQ ID NO: 1532 - DNA, 22 bp, synthetic construct
  misc_feature 1..22: note = Synthetic
  source 1..22: mol_type = other DNA
gtagcatcctgtaggacattgg

SEQ ID NO: 1533 - DNA, 24 bp, synthetic construct
  misc_feature 1..24: note = Synthetic
  source 1..24: mol_type = other DNA
gtttcatcagctcttttactccct

SEQ ID NO: 1534 - DNA, 25 bp, synthetic construct
  misc_feature 1..25: note = Synthetic
  source 1..25: mol_type = other DNA
tgacttacttgccattgtttcatca

SEQ ID NO: 1535 - DNA, 24 bp, synthetic construct
  misc_feature 1..24: note = Synthetic
  source 1..24: mol_type = other DNA
tgacttacttgccattgtttcatc

SEQ ID NO: 1536 - DNA, 23 bp, synthetic construct
  misc_feature 1..23: note = Synthetic
  source 1..23: mol_type = other DNA
ctgcatcatcggaaccttccagg

SEQ ID NO: 1537 - DNA, 20 bp, synthetic construct
  misc_feature 1..20: note = Synthetic
  source 1..20: mol_type = other DNA
ctgcatcatcggaaccttcc

SEQ ID NO: 1538 - DNA, 24 bp, synthetic construct
  misc_feature 1..24: note = Synthetic
  source 1..24: mol_type = other DNA
tgctgagaattgttcaattggatc

SEQ ID NO: 1539 - DNA, 23 bp, synthetic construct
  misc_feature 1..23: note = Synthetic
  source 1..23: mol_type = other DNA
acaggactgcatcatcggaacct

SEQ ID NO: 1540 - DNA, 22 bp, synthetic construct
  misc_feature 1..22: note = Synthetic
  source 1..22: mol_type = other DNA
acaggactgcatcatcggaacc

SEQ ID NO: 1541 - DNA, 24 bp, synthetic construct
  misc_feature 1..24: note = Synthetic
  source 1..24: mol_type = other DNA
actgcatcatcggaaccttccagg

SEQ ID NO: 1542 - DNA, 23 bp, synthetic construct
  misc_feature 1..23: note = Synthetic
  source 1..23: mol_type = other DNA
actgcatcatcggaaccttccag

SEQ ID NO: 1543 - DNA, 21 bp, synthetic construct
  misc_feature 1..21: note = Synthetic
  source 1..21: mol_type = other DNA
actgcatcatcggaaccttcc

SEQ ID NO: 1544 - DNA, 25 bp, synthetic construct
  misc_feature 1..25: note = Synthetic
  source 1..25: mol_type = other DNA
acaggactgcatcatcggaaccttc

SEQ ID NO: 1545 - DNA, 25 bp, synthetic construct
  misc_feature 1..25: note = Synthetic
  source 1..25: mol_type = other DNA
gtaacaggactgcatcatcggaacc

SEQ ID NO: 1546 - DNA, 24 bp, synthetic construct
  misc_feature 1..24: note = Synthetic
  source 1..24: mol_type = other DNA
gtaacaggactgcatcatcggaac

SEQ ID NO: 1547 - DNA, 23 bp, synthetic construct
  misc_feature 1..23: note = Synthetic
  source 1..23: mol_type = other DNA
gagaattgttcaattggatccac

SEQ ID NO: 1548 - DNA, 25 bp, synthetic construct
  misc_feature 1..25: note = Synthetic
  source 1..25: mol_type = other DNA
tgctgagaattgttcaattggatcc

SEQ ID NO: 1549 - DNA, 25 bp, synthetic construct
  misc_feature 1..25: note = Synthetic
  source 1..25: mol_type = other DNA
atgctgagaattgttcaattggatc

SEQ ID NO: 1550 - DNA, 24 bp, synthetic construct
  misc_feature 1..24: note = Synthetic
  source 1..24: mol_type = other DNA
acaggactgcatcatcggaacctt

SEQ ID NO: 1551 - DNA, 20 bp, synthetic construct
  misc_feature 1..20: note = Synthetic
  source 1..20: mol_type = other DNA
ggactgcatcatcggaacct

SEQ ID NO: 1552 - DNA, 24 bp, synthetic construct
  misc_feature 1..24: note = Synthetic
  source 1..24: mol_type = other DNA
tgagaattgttcaattggatccac

SEQ ID NO: 1553 - DNA, 25 bp, synthetic construct
  misc_feature 1..25: note = Synthetic
  source 1..25: mol_type = other DNA
taacaggactgcatcatcggaacct

SEQ ID NO: 1554 - DNA, 24 bp, synthetic construct
  misc_feature 1..24: note = Synthetic
  source 1..24: mol_type = other DNA
taacaggactgcatcatcggaacc

SEQ ID NO: 1555 - DNA, 25 bp, synthetic construct
  misc_feature 1..25: note = Synthetic
  source 1..25: mol_type = other DNA
ggactgcatcatcggaaccttccag

SEQ ID NO: 1556 - DNA, 24 bp, synthetic construct
  misc_feature 1..24: note = Synthetic
  source 1..24: mol_type = other DNA
ggactgcatcatcggaaccttcca

SEQ ID NO: 1557 - DNA, 23 bp, synthetic construct
  misc_feature 1..23: note = Synthetic
  source 1..23: mol_type = other DNA
ggactgcatcatcggaaccttcc

SEQ ID NO: 1558 - DNA, 24 bp, synthetic construct
  misc_feature 1..24: note = Synthetic
  source 1..24: mol_type = other DNA
gagaattgttcaattggatccaca

SEQ ID NO: 1559 - DNA, 25 bp, synthetic construct
  misc_feature 1..25: note = Synthetic
  source 1..25: mol_type = other DNA
gagaattgttcaattggatccacaa

SEQ ID NO: 1560 - DNA, 25 bp, synthetic construct
  misc_feature 1..25: note = Synthetic
  source 1..25: mol_type = other DNA
tgagaattgttcaattggatccaca

SEQ ID NO: 1561 - DNA, 21 bp, synthetic construct
  misc_feature 1..21: note = Synthetic
  source 1..21: mol_type = other DNA
acaggactgcatcatcggaac

SEQ ID NO: 1562 - DNA, 21 bp, synthetic construct
  misc_feature 1..21: note = Synthetic
  source 1..21: mol_type = other DNA
taacaggactgcatcatcgga

SEQ ID NO: 1563 - DNA, 22 bp, synthetic construct
  misc_feature 1..22: note = Synthetic
  source 1..22: mol_type = other DNA
gtaacaggactgcatcatcgga

SEQ ID NO: 1564 - DNA, 23 bp, synthetic construct
  misc_feature 1..23: note = Synthetic
  source 1..23: mol_type = other DNA
taacaggactgcatcatcggaac

SEQ ID NO: 1565 - DNA, 23 bp, synthetic construct
  misc_feature 1..23: note = Synthetic
  source 1..23: mol_type = other DNA
gtaacaggactgcatcatcggaa

SEQ ID NO: 1566 - DNA, 24 bp, synthetic construct
  misc_feature 1..24: note = Synthetic
  source 1..24: mol_type = other DNA
caagcgatgaatgtgaatttggag

SEQ ID NO: 1567 - DNA, 22 bp, synthetic construct
  misc_feature 1..22: note = Synthetic
  source 1..22: mol_type = other DNA
ggactgcatcatcggaaccttc

SEQ ID NO: 1568 - DNA, 21 bp, synthetic construct
  misc_feature 1..21: note = Synthetic
  source 1..21: mol_type = other DNA
ggactgcatcatcggaacctt

SEQ ID NO: 1569 - DNA, 24 bp, synthetic construct
  misc_feature 1..24: note = Synthetic
  source 1..24: mol_type = other DNA
tcgtcttgaaccctcccaagctcc

SEQ ID NO: 1570 - DNA, 25 bp, synthetic construct
  misc_feature 1..25: note = Synthetic
  source 1..25: mol_type = other DNA
atcgtcttgaaccctcccaagctcc

SEQ ID NO: 1571 - DNA, 22 bp, synthetic construct
  misc_feature 1..22: note = Synthetic
  source 1..22: mol_type = other DNA
caccaccccattattacagcca

SEQ ID NO: 1572 - DNA, 23 bp, synthetic construct
  misc_feature 1..23: note = Synthetic
  source 1..23: mol_type = other DNA
tcaccaccccattattacagcca

SEQ ID NO: 1573 - DNA, 22 bp, synthetic construct
  misc_feature 1..22: note = Synthetic
  source 1..22: mol_type = other DNA
tcaccaccccattattacagcc

SEQ ID NO: 1574 - DNA, 20 bp, synthetic construct
  misc_feature 1..20: note = Synthetic
  source 1..20: mol_type = other DNA
ccatccagtttcaccacccc

SEQ ID NO: 1575 - DNA, 24 bp, synthetic construct
  misc_feature 1..24: note = Synthetic
  source 1..24: mol_type = other DNA
tcaccaccccattattacagccaa

SEQ ID NO: 1576 - DNA, 21 bp, synthetic construct
  misc_feature 1..21: note = Synthetic
  source 1..21: mol_type = other DNA
tccatccagtttcaccacccc

SEQ ID NO: 1577 - DNA, 21 bp, synthetic construct
  misc_feature 1..21: note = Synthetic
  source 1..21: mol_type = other DNA
tcaccaccccattattacagc

SEQ ID NO: 1578 - DNA, 21 bp, synthetic construct
  misc_feature 1..21: note = Synthetic
  source 1..21: mol_type = other DNA
ccatccagtttcaccacccca

SEQ ID NO: 1579 - DNA, 25 bp, synthetic construct
  misc_feature 1..25: note = Synthetic
  source 1..25: mol_type = other DNA
tttcaccaccccattattacagcca

SEQ ID NO: 1580 - DNA, 24 bp, synthetic construct
  misc_feature 1..24: note = Synthetic
  source 1..24: mol_type = other DNA
tttcaccaccccattattacagcc

SEQ ID NO: 1581 - DNA, 20 bp, synthetic construct
  misc_feature 1..20: note = Synthetic
  source 1..20: mol_type = other DNA
catccagtttcaccacccca

SEQ ID NO: 1582 - DNA, 22 bp, synthetic construct
  misc_feature 1..22: note = Synthetic
  source 1..22: mol_type = other DNA
tccatccagtttcaccacccca

SEQ ID NO: 1583 - DNA, 24 bp, synthetic construct
  misc_feature 1..24: note = Synthetic
  source 1..24: mol_type = other DNA
ggaaatgcctgacttacttgccat

SEQ ID NO: 1584 - DNA, 25 bp, synthetic construct
  misc_feature 1..25: note = Synthetic
  source 1..25: mol_type = other DNA
agtttcaccaccccattattacagc

SEQ ID NO: 1585 - DNA, 21 bp, synthetic construct
  misc_feature 1..21: note = Synthetic
  source 1..21: mol_type = other DNA
catccagtttcaccaccccat

SEQ ID NO: 1586 - DNA, 22 bp, synthetic construct
  misc_feature 1..22: note = Synthetic
  source 1..22: mol_type = other DNA
ccatccagtttcaccaccccat

SEQ ID NO: 1587 - DNA, 23 bp, synthetic construct
  misc_feature 1..23: note = Synthetic
  source 1..23: mol_type = other DNA
gcggaaatgcctgacttacttgc

SEQ ID NO: 1588 - DNA, 25 bp, synthetic construct
  misc_feature 1..25: note = Synthetic
  source 1..25: mol_type = other DNA
gtttcaccaccccattattacagcc

SEQ ID NO: 1589 - DNA, 22 bp, synthetic construct
  misc_feature 1..22: note = Synthetic
  source 1..22: mol_type = other DNA
catccagtttcaccaccccatt

SEQ ID NO: 1590 - DNA, 23 bp, synthetic construct
  misc_feature 1..23: note = Synthetic
  source 1..23: mol_type = other DNA
tccatccagtttcaccaccccat

SEQ ID NO: 1591 - DNA, 25 bp, synthetic construct
  misc_feature 1..25: note = Synthetic
  source 1..25: mol_type = other DNA
gcggaaatgcctgacttacttgcca

SEQ ID NO: 1592 - DNA, 23 bp, synthetic construct
  misc_feature 1..23: note = Synthetic
  source 1..23: mol_type = other DNA
tttcaccaccccattattacagc

SEQ ID NO: 1593 - DNA, 23 bp, synthetic construct
  misc_feature 1..23: note = Synthetic
  source 1..23: mol_type = other DNA
catccagtttcaccaccccatta

SEQ ID NO: 1594 - DNA, 24 bp, synthetic construct
  misc_feature 1..24: note = Synthetic
  source 1..24: mol_type = other DNA
ccatccagtttcaccaccccatta

SEQ ID NO: 1595 - DNA, 23 bp, synthetic construct
  misc_feature 1..23: note = Synthetic
  source 1..23: mol_type = other DNA
ccatccagtttcaccaccccatt

SEQ ID NO: 1596 - DNA, 23 bp, synthetic construct
  misc_feature 1..23: note = Synthetic
  source 1..23: mol_type = other DNA
gaaatgcctgacttacttgccat

SEQ ID NO: 1597 - DNA, 24 bp, synthetic construct
  misc_feature 1..24: note = Synthetic
  source 1..24: mol_type = other DNA
gcggaaatgcctgacttacttgcc

SEQ ID NO: 1598 - DNA, 25 bp, synthetic construct
  misc_feature 1..25: note = Synthetic
  source 1..25: mol_type = other DNA
agcggaaatgcctgacttacttgcc

SEQ ID NO: 1599 - DNA, 24 bp, synthetic construct
  misc_feature 1..24: note = Synthetic
  source 1..24: mol_type = other DNA
tccatccagtttcaccaccccatt

SEQ ID NO: 1600 - DNA, 20 bp, synthetic construct
  misc_feature 1..20: note = Synthetic
  source 1..20: mol_type = other DNA
tccatccagtttcaccaccc

SEQ ID NO: 1601 - DNA, 24 bp, synthetic construct
  misc_feature 1..24: note = Synthetic
  source 1..24: mol_type = other DNA
catccagtttcaccaccccattat

SEQ ID NO: 1602 - DNA, 25 bp, synthetic construct
  misc_feature 1..25: note = Synthetic
  source 1..25: mol_type = other DNA
ccatccagtttcaccaccccattat

SEQ ID NO: 1603 - DNA, 25 bp, synthetic construct
  misc_feature 1..25: note = Synthetic
  source 1..25: mol_type = other DNA
tccatccagtttcaccaccccatta

SEQ ID NO: 1604 - DNA, 24 bp, synthetic construct
  misc_feature 1..24: note = Synthetic
  source 1..24: mol_type = other DNA
gaaatgcctgacttacttgccatt

SEQ ID NO: 1605 - DNA, 25 bp, synthetic construct
  misc_feature 1..25: note = Synthetic
  source 1..25: mol_type = other DNA
catccagtttcaccaccccattatt

SEQ ID NO: 1606 - DNA, 25 bp, synthetic construct
  misc_feature 1..25: note = Synthetic
  source 1..25: mol_type = other DNA
ggaaatgcctgacttacttgccatt

SEQ ID NO: 1607 - DNA, 23 bp, synthetic construct
  misc_feature 1..23: note = Synthetic
  source 1..23: mol_type = other DNA
ggaaatgcctgacttacttgcca

SEQ ID NO: 1608 - DNA, 21 bp, synthetic construct
  misc_feature 1..21: note = Synthetic
  source 1..21: mol_type = other DNA
gtaacaggactgcatcatcgg

SEQ ID NO: 1609 - DNA, 24 bp, synthetic construct
  misc_feature 1..24: note = Synthetic
  source 1..24: mol_type = other DNA
acaagcgatgaatgtgaatttgga

SEQ ID NO: 1610 - DNA, 21 bp, synthetic construct
  misc_feature 1..21: note = Synthetic
  source 1..21: mol_type = other DNA
gtttcaccaccccattattac

SEQ ID NO: 1611 - DNA, 24 bp, synthetic construct
  misc_feature 1..24: note = Synthetic
  source 1..24: mol_type = other DNA
gtttcaccaccccattattacagc

SEQ ID NO: 1612 - DNA, 25 bp, synthetic construct
  misc_feature 1..25: note = Synthetic
  source 1..25: mol_type = other DNA
gtaatctatgagtttcttccaaagc

SEQ ID NO: 1613 - DNA, 25 bp, synthetic construct
  misc_feature 1..25: note = Synthetic
  source 1..25: mol_type = other DNA
gcagtaatctatgagtttcttccaa

SEQ ID NO: 1614 - DNA, 24 bp, synthetic construct
  misc_feature 1..24: note = Synthetic
  source 1..24: mol_type = other DNA
gcagtaatctatgagtttcttcca

SEQ ID NO: 1615 - DNA, 25 bp, synthetic construct
  misc_feature 1..25: note = Synthetic
  source 1..25: mol_type = other DNA
tgcagtaatctatgagtttcttcca

SEQ ID NO: 1616 - DNA, 23 bp, synthetic construct
  misc_feature 1..23: note = Synthetic
  source 1..23: mol_type = other DNA
gcagtaatctatgagtttcttcc

SEQ ID NO: 1617 - DNA, 23 bp, synthetic construct
  misc_feature 1..23: note = Synthetic
  source 1..23: mol_type = other DNA
tgcagtaatctatgagtttcttc

SEQ ID NO: 1618 - DNA, 22 bp, synthetic construct
  misc_feature 1..22: note = Synthetic
  source 1..22: mol_type = other DNA
tgtaggacattggcagttgttt

SEQ ID NO: 1619 - DNA, 23 bp, synthetic construct
  misc_feature 1..23: note = Synthetic
  source 1..23: mol_type = other DNA
ctgtaggacattggcagttgttt

SEQ ID NO: 1620 - DNA, 20 bp, synthetic construct
  misc_feature 1..20: note = Synthetic
  source 1..20: mol_type = other DNA
gtaggacattggcagttgtt

SEQ ID NO: 1621 - DNA, 21 bp, synthetic construct
  misc_feature 1..21: note = Synthetic
  source 1..21: mol_type = other DNA
tgtaggacattggcagttgtt

SEQ ID NO: 1622 - DNA, 20 bp, synthetic construct
  misc_feature 1..20: note = Synthetic
  source 1..20: mol_type = other DNA
ctgtaggacattggcagttg

SEQ ID NO: 1623 - DNA, 20 bp, synthetic construct
  misc_feature 1..20: note = Synthetic
  source 1..20: mol_type = other DNA
cctgtaggacattggcagtt

SEQ ID NO: 1624 - DNA, 22 bp, synthetic construct
  misc_feature 1..22: note = Synthetic
  source 1..22: mol_type = other DNA
ggattttttggctgttttcatc

SEQ ID NO: 1625 - DNA, 23 bp, synthetic construct
  misc_feature 1..23: note = Synthetic
  source 1..23: mol_type = other DNA
aggattttttggctgttttcatc

SEQ ID NO: 1626 - DNA, 24 bp, synthetic construct
  misc_feature 1..24: note = Synthetic
  source 1..24: mol_type = other DNA
caggattttttggctgttttcatc

SEQ ID NO: 1627 - DNA, 25 bp, synthetic construct
  misc_feature 1..25: note = Synthetic
  source 1..25: mol_type = other DNA
tcaggattttttggctgttttcatc

SEQ ID NO: 1628 - DNA, 25 bp, synthetic construct
  misc_feature 1..25: note = Synthetic
  source 1..25: mol_type = other DNA
ctcaggattttttggctgttttcat

SEQ ID NO: 1629 - DNA, 24 bp, synthetic construct
  misc_feature 1..24: note = Synthetic
  source 1..24: mol_type = other DNA
ctcaggattttttggctgttttca

SEQ ID NO: 1630 - DNA, 25 bp, synthetic construct
  misc_feature 1..25: note = Synthetic
  source 1..25: mol_type = other DNA
tctcaggattttttggctgttttca

SEQ ID NO: 1631 - DNA, 24 bp, synthetic construct
  misc_feature 1..24: note = Synthetic
  source 1..24: mol_type = other DNA
tctcaggattttttggctgttttc

SEQ ID NO: 1632 - DNA, 25 bp, synthetic construct
  misc_feature 1..25: note = Synthetic
  source 1..25: mol_type = other DNA
atctcaggattttttggctgttttc

SEQ ID NO: 1633 - DNA, 24 bp, synthetic construct
  misc_feature 1..24: note = Synthetic
  source 1..24: mol_type = other DNA
gatctcaggattttttggctgttt

SEQ ID NO: 1634 - DNA, 25 bp, synthetic construct
  misc_feature 1..25: note = Synthetic
  source 1..25: mol_type = other DNA
ggatctcaggattttttggctgttt

SEQ ID NO: 1635 - DNA, 24 bp, synthetic construct
  misc_feature 1..24: note = Synthetic
  source 1..24: mol_type = other DNA
ggatctcaggattttttggctgtt

SEQ ID NO: 1636 - DNA, 25 bp, synthetic construct
  misc_feature 1..25: note = Synthetic
  source 1..25: mol_type = other DNA
gggatctcaggattttttggctgtt

SEQ ID NO: 1637 - DNA, 21 bp, synthetic construct
  misc_feature 1..21: note = Synthetic
  source 1..21: mol_type = other DNA
gaaccttccagggatctcagg

SEQ ID NO: 1638 - DNA, 25 bp, synthetic construct
  misc_feature 1..25: note = Synthetic
  source 1..25: mol_type = other DNA
gttgcagtaatctatgagtttcttc

SEQ ID NO: 1639 - DNA, 24 bp, synthetic construct
  misc_feature 1..24: note = Synthetic
  source 1..24: mol_type = other DNA
gttgcagtaatctatgagtttctt

SEQ ID NO: 1640 - DNA, 25 bp, synthetic construct
  misc_feature 1..25: note = Synthetic
  source 1..25: mol_type = other DNA
tgttgcagtaatctatgagtttctt

SEQ ID NO: 1641 - DNA, 23 bp, synthetic construct
  misc_feature 1..23: note = Synthetic
  source 1..23: mol_type = other DNA
gttgcagtaatctatgagtttct

SEQ ID NO: 1642 - DNA, 22 bp, synthetic construct
  misc_feature 1..22: note = Synthetic
  source 1..22: mol_type = other DNA
gttgcagtaatctatgagtttc

SEQ ID NO: 1643 - DNA, 23 bp, synthetic construct
  misc_feature 1..23: note = Synthetic
  source 1..23: mol_type = other DNA
tgttgcagtaatctatgagtttc

SEQ ID NO: 1644 - DNA, 23 bp, synthetic construct
  misc_feature 1..23: note = Synthetic
  source 1..23: mol_type = other DNA
ctgttgcagtaatctatgagttt

SEQ ID NO: 1645 - DNA, 20 bp, synthetic construct
  misc_feature 1..20: note = Synthetic
  source 1..20: mol_type = other DNA
gttgcagtaatctatgagtt

SEQ ID NO: 1646 - DNA, 21 bp, synthetic construct
  misc_feature 1..21: note = Synthetic
  source 1..21: mol_type = other DNA
tgttgcagtaatctatgagtt

SEQ ID NO: 1647 - DNA, 22 bp, synthetic construct
  misc_feature 1..22: note = Synthetic
  source 1..22: mol_type = other DNA
ctgttgcagtaatctatgagtt

SEQ ID NO: 1648 - DNA, 20 bp, synthetic construct
  misc_feature 1..20: note = Synthetic
  source 1..20: mol_type = other DNA
tgttgcagtaatctatgagt

SEQ ID NO: 1649 - DNA, 21 bp, synthetic construct
  misc_feature 1..21: note = Synthetic
  source 1..21: mol_type = other DNA
ctgttgcagtaatctatgagt

SEQ ID NO: 1650 - DNA, 20 bp, synthetic construct
  misc_feature 1..20: note = Synthetic
  source 1..20: mol_type = other DNA
tggacttttctggtatcatc

SEQ ID NO: 1651 - DNA, 21 bp, synthetic construct
  misc_feature 1..21: note = Synthetic
  source 1..21: mol_type = other DNA
gtggacttttctggtatcatc

SEQ ID NO: 1652 - DNA, 22 bp, synthetic construct
  misc_feature 1..22: note = Synthetic
  source 1..22: mol_type = other DNA
tgtggacttttctggtatcatc

SEQ ID NO: 1653 - DNA, 24 bp, synthetic construct
  misc_feature 1..24: note = Synthetic
  source 1..24: mol_type = other DNA
catgtggacttttctggtatcatc

SEQ ID NO: 1654 - DNA, 22 bp, synthetic construct
  misc_feature 1..22: note = Synthetic
  source 1..22: mol_type = other DNA
atgtggacttttctggtatcat

SEQ ID NO: 1655 - DNA, 23 bp, synthetic construct
  misc_feature 1..23: note = Synthetic
  source 1..23: mol_type = other DNA
catgtggacttttctggtatcat

SEQ ID NO: 1656 - DNA, 20 bp, synthetic construct
  misc_feature 1..20: note = Synthetic
  source 1..20: mol_type = other DNA
tgtggacttttctggtatca

SEQ ID NO: 1657 - DNA, 21 bp, synthetic construct
  misc_feature 1..21: note = Synthetic
  source 1..21: mol_type = other DNA
atgtggacttttctggtatca

SEQ ID NO: 1658 - DNA, 22 bp, synthetic construct
  misc_feature 1..22: note = Synthetic
  source 1..22: mol_type = other DNA
catgtggacttttctggtatca

SEQ ID NO: 1659 - DNA, 25 bp, synthetic construct
  misc_feature 1..25: note = Synthetic
  source 1..25: mol_type = other DNA
tatcatgtggacttttctggtatca

SEQ ID NO: 1660 - DNA, 20 bp, synthetic construct
  misc_feature 1..20: note = Synthetic
  source 1..20: mol_type = other DNA
atgtggacttttctggtatc

SEQ ID NO: 1661 - DNA, 21 bp, synthetic construct
  misc_feature 1..21: note = Synthetic
  source 1..21: mol_type = other DNA
catgtggacttttctggtatc

SEQ ID NO: 1662 - DNA, 24 bp, synthetic construct
  misc_feature 1..24: note = Synthetic
  source 1..24: mol_type = other DNA
tatcatgtggacttttctggtatc

SEQ ID NO: 1663 - DNA, 20 bp, synthetic construct
  misc_feature 1..20: note = Synthetic
  source 1..20: mol_type = other DNA
catgtggacttttctggtat

SEQ ID NO: 1664 - DNA, 23 bp, synthetic construct
  misc_feature 1..23: note = Synthetic
  source 1..23: mol_type = other DNA
tatcatgtggacttttctggtat

SEQ ID NO: 1665 - DNA, 24 bp, synthetic construct
  misc_feature 1..24: note = Synthetic
  source 1..24: mol_type = other DNA
ttatcatgtggacttttctggtat

SEQ ID NO: 1666 - DNA, 22 bp, synthetic construct
  misc_feature 1..22: note = Synthetic
  source 1..22: mol_type = other DNA
tatcatgtggacttttctggta

SEQ ID NO: 1667 - DNA, 21 bp, synthetic construct
  misc_feature 1..21: note = Synthetic
  source 1..21: mol_type = other DNA
tatcatgtggacttttctggt

SEQ ID NO: 1668 - DNA, 20 bp, synthetic construct
  misc_feature 1..20: note = Synthetic
  source 1..20: mol_type = other DNA
tatcatgtggacttttctgg

SEQ ID NO: 1669 - DNA, 20 bp, synthetic construct
  misc_feature 1..20: note = Synthetic
  source 1..20: mol_type = other DNA
ttatcatgtggacttttctg

SEQ ID NO: 1670 - DNA, 20 bp, synthetic construct
  misc_feature 1..20: note = Synthetic
  source 1..20: mol_type = other DNA
gttatcatgtggacttttct

SEQ ID NO: 1671 - DNA, 21 bp, synthetic construct
  misc_feature 1..21: note = Synthetic
  source 1..21: mol_type = other DNA
tgttatcatgtggacttttct

SEQ ID NO: 1672 - DNA, 22 bp, synthetic construct
  misc_feature 1..22: note = Synthetic
  source 1..22: mol_type = other DNA
ctgttatcatgtggacttttct

SEQ ID NO: 1673 - DNA, 20 bp, synthetic construct
  misc_feature 1..20: note = Synthetic
  source 1..20: mol_type = other DNA
tgttatcatgtggacttttc

SEQ ID NO: 1674 - DNA, 21 bp, synthetic construct
  misc_feature 1..21: note = Synthetic
  source 1..21: mol_type = other DNA
tctgttatcatgtggactttt

SEQ ID NO: 1675 - DNA, 20 bp, synthetic construct
  misc_feature 1..20: note = Synthetic
  source 1..20: mol_type = other DNA
tctgttatcatgtggacttt

SEQ ID NO: 1676 - DNA, 20 bp, synthetic construct
  misc_feature 1..20: note = Synthetic
  source 1..20: mol_type = other DNA
tctctgttatcatgtggact

SEQ ID NO: 1677 - DNA, 20 bp, synthetic construct
  misc_feature 1..20: note = Synthetic
  source 1..20: mol_type = other DNA
ttctctgttatcatgtggac

SEQ ID NO: 1678 - DNA, 21 bp, synthetic construct
  misc_feature 1..21: note = Synthetic
  source 1..21: mol_type = other DNA
attctctgttatcatgtggac

SEQ ID NO: 1679 - DNA, 22 bp, synthetic construct
  misc_feature 1..22: note = Synthetic
  source 1..22: mol_type = other DNA
tattctctgttatcatgtggac

SEQ ID NO: 1680 - DNA, 23 bp, synthetic construct
  misc_feature 1..23: note = Synthetic
  source 1..23: mol_type = other DNA
atattctctgttatcatgtggac

SEQ ID NO: 1681 - DNA, 20 bp, synthetic construct
  misc_feature 1..20: note = Synthetic
  source 1..20: mol_type = other DNA
tattctctgttatcatgtgg

SEQ ID NO: 1682 - DNA, 24 bp, synthetic construct
  misc_feature 1..24: note = Synthetic
  source 1..24: mol_type = other DNA
ttgcagtaatctatgagtttcttc

SEQ ID NO: 1683 - DNA, 25 bp, synthetic construct
  misc_feature 1..25: note = Synthetic
  source 1..25: mol_type = other DNA
ggacattggcagttgtttcagcttc

SEQ ID NO: 1684 - DNA, 24 bp, synthetic construct
  misc_feature 1..24: note = Synthetic
  source 1..24: mol_type = other DNA
ggacattggcagttgtttcagctt

SEQ ID NO: 1685 - DNA, 25 bp, synthetic construct
  misc_feature 1..25: note = Synthetic
  source 1..25: mol_type = other DNA
aggacattggcagttgtttcagctt

SEQ ID NO: 1686 - DNA, 22 bp, synthetic construct
  misc_feature 1..22: note = Synthetic
  source 1..22: mol_type = other DNA
gacattggcagttgtttcagct

SEQ ID NO: 1687 - DNA, 23 bp, synthetic construct
  misc_feature 1..23: note = Synthetic
  source 1..23: mol_type = other DNA
ggacattggcagttgtttcagct

SEQ ID NO: 1688 - DNA, 24 bp, synthetic construct
  misc_feature 1..24: note = Synthetic
  source 1..24: mol_type = other DNA
aggacattggcagttgtttcagct

SEQ ID NO: 1689 - DNA, 25 bp, synthetic construct
  misc_feature 1..25: note = Synthetic
  source 1..25: mol_type = other DNA
taggacattggcagttgtttcagct

SEQ ID NO: 1690 - DNA, 21 bp, synthetic construct
  misc_feature 1..21: note = Synthetic
  source 1..21: mol_type = other DNA
gacattggcagttgtttcagc

SEQ ID NO: 1691 - DNA, 22 bp, synthetic construct
  misc_feature 1..22: note = Synthetic
  source 1..22: mol_type = other DNA
ggacattggcagttgtttcagc

SEQ ID NO: 1692 - DNA, 23 bp, synthetic construct
  misc_feature 1..23: note = Synthetic
  source 1..23: mol_type = other DNA
aggacattggcagttgtttcagc

SEQ ID NO: 1693 - DNA, 25 bp, synthetic construct
  misc_feature 1..25: note = Synthetic
  source 1..25: mol_type = other DNA
gcatcctgtaggacattggcagttg

SEQ ID NO: 1694 - DNA, 24 bp, synthetic construct
  misc_feature 1..24: note = Synthetic
  source 1..24: mol_type = other DNA
gcatcctgtaggacattggcagtt

SEQ ID NO: 1695 - DNA, 23 bp, synthetic construct
  misc_feature 1..23: note = Synthetic
  source 1..23: mol_type = other DNA
gcatcctgtaggacattggcagt

SEQ ID NO: 1696 - DNA, 20 bp, synthetic construct
  misc_feature 1..20: note = Synthetic
  source 1..20: mol_type = other DNA
atcctgtaggacattggcag

SEQ ID NO: 1697 - DNA, 22 bp, synthetic construct
  misc_feature 1..22: note = Synthetic
  source 1..22: mol_type = other DNA
gcatcctgtaggacattggcag

SEQ ID NO: 1698 - DNA, 21 bp, synthetic construct
  misc_feature 1..21: note = Synthetic
  source 1..21: mol_type = other DNA
gcatcctgtaggacattggca

SEQ ID NO: 1699 - DNA, 20 bp, synthetic construct
  misc_feature 1..20: note = Synthetic
  source 1..20: mol_type = other DNA
gcatcctgtaggacattggc

SEQ ID NO: 1700 - DNA, 20 bp, synthetic construct
  misc_feature 1..20: note = Synthetic
  source 1..20: mol_type = other DNA
agcatcctgtaggacattgg

SEQ ID NO: 1701 - DNA, 23 bp, synthetic construct
  misc_feature 1..23: note = Synthetic
  source 1..23: mol_type = other DNA
cttgccattgtttcatcagctct

SEQ ID NO: 1702 - DNA, 24 bp, synthetic construct
  misc_feature 1..24: note = Synthetic
  source 1..24: mol_type = other DNA
acttgccattgtttcatcagctct

SEQ ID NO: 1703 - DNA, 25 bp, synthetic construct
  misc_feature 1..25: note = Synthetic
  source 1..25: mol_type = other DNA
tacttgccattgtttcatcagctct

SEQ ID NO: 1704 - DNA, 23 bp, synthetic construct
  misc_feature 1..23: note = Synthetic
  source 1..23: mol_type = other DNA
acttgccattgtttcatcagctc

SEQ ID NO: 1705 - DNA, 24 bp, synthetic construct
  misc_feature 1..24: note = Synthetic
  source 1..24: mol_type = other DNA
tacttgccattgtttcatcagctc

SEQ ID NO: 1706 - DNA, 25 bp, synthetic construct
  misc_feature 1..25: note = Synthetic
  source 1..25: mol_type = other DNA
ttacttgccattgtttcatcagctc

SEQ ID NO: 1707 - DNA, 25 bp, synthetic construct
  misc_feature 1..25: note = Synthetic
  source 1..25: mol_type = other DNA
cttacttgccattgtttcatcagct

SEQ ID NO: 1708 - DNA, 24 bp, synthetic construct
  misc_feature 1..24: note = Synthetic
  source 1..24: mol_type = other DNA
cttacttgccattgtttcatcagc

SEQ ID NO: 1709 - DNA, 25 bp, synthetic construct
  misc_feature 1..25: note = Synthetic
  source 1..25: mol_type = other DNA
acttacttgccattgtttcatcagc

SEQ ID NO: 1710 - DNA, 24 bp, synthetic construct
  misc_feature 1..24: note = Synthetic
  source 1..24: mol_type = other DNA
acttacttgccattgtttcatcag

SEQ ID NO: 1711 - DNA, 25 bp, synthetic construct
  misc_feature 1..25: note = Synthetic
  source 1..25: mol_type = other DNA
ggctgttttcatccaggttgtgata

SEQ ID NO: 1712 - DNA, 24 bp, synthetic construct
  misc_feature 1..24: note = Synthetic
  source 1..24: mol_type = other DNA
ggctgttttcatccaggttgtgat

SEQ ID NO: 1713 - DNA, 25 bp, synthetic construct
  misc_feature 1..25: note = Synthetic
  source 1..25: mol_type = other DNA
tggctgttttcatccaggttgtgat

SEQ ID NO: 1714 - DNA, 23 bp, synthetic construct
  misc_feature 1..23: note = Synthetic
  source 1..23: mol_type = other DNA
ggctgttttcatccaggttgtga

SEQ ID NO: 1715 - DNA, 24 bp, synthetic construct
  misc_feature 1..24: note = Synthetic
  source 1..24: mol_type = other DNA
tggctgttttcatccaggttgtga

SEQ ID NO: 1716 - DNA, 25 bp, synthetic construct
  misc_feature 1..25: note = Synthetic
  source 1..25: mol_type = other DNA
ttggctgttttcatccaggttgtga

SEQ ID NO: 1717 - DNA, 25 bp, synthetic construct
  misc_feature 1..25: note = Synthetic
  source 1..25: mol_type = other DNA
tttggctgttttcatccaggttgtg

SEQ ID NO: 1718 - DNA, 25 bp, synthetic construct
  misc_feature 1..25: note = Synthetic
  source 1..25: mol_type = other DNA
ttttggctgttttcatccaggttgt

SEQ ID NO: 1719 - DNA, 22 bp, synthetic construct
  misc_feature 1..22: note = Synthetic
  source 1..22: mol_type = other DNA
gattttttggctgttttcatcc

SEQ ID NO: 1720 - DNA, 23 bp, synthetic construct
  misc_feature 1..23: note = Synthetic
  source 1..23: mol_type = other DNA
ggattttttggctgttttcatcc

SEQ ID NO: 1721 - DNA, 24 bp, synthetic construct
  misc_feature 1..24: note = Synthetic
  source 1..24: mol_type = other DNA
aggattttttggctgttttcatcc

SEQ ID NO: 1722 - DNA, 25 bp, synthetic construct
  misc_feature 1..25: note = Synthetic
  source 1..25: mol_type = other DNA
caggattttttggctgttttcatcc

SEQ ID NO: 1723 - DNA, 23 bp, synthetic construct
  misc_feature 1..23: note = Synthetic
  source 1..23: mol_type = other DNA
ggatctcaggattttttggctgt

SEQ ID NO: 1724 - DNA, 24 bp, synthetic construct
  misc_feature 1..24: note = Synthetic
  source 1..24: mol_type = other DNA
gggatctcaggattttttggctgt

SEQ ID NO: 1725 - DNA, 24 bp, synthetic construct
  misc_feature 1..24: note = Synthetic
  source 1..24: mol_type = other DNA
tcggaaccttccagggatctcagg

SEQ ID NO: 1726 - DNA, 25 bp, synthetic construct
  misc_feature 1..25: note = Synthetic
  source 1..25: mol_type = other DNA
atcggaaccttccagggatctcagg

SEQ ID NO: 1727 - DNA, 23 bp, synthetic construct
  misc_feature 1..23: note = Synthetic
  source 1..23: mol_type = other DNA
tcggaaccttccagggatctcag

SEQ ID NO: 1728 - DNA, 24 bp, synthetic construct
  misc_feature 1..24: note = Synthetic
  source 1..24: mol_type = other DNA
atcggaaccttccagggatctcag

SEQ ID NO: 1729 - DNA, 25 bp, synthetic construct
  misc_feature 1..25: note = Synthetic
  source 1..25: mol_type = other DNA
catcggaaccttccagggatctcag

SEQ ID NO: 1730 - DNA, 22 bp, synthetic construct
  misc_feature 1..22: note = Synthetic
  source 1..22: mol_type = other DNA
tcggaaccttccagggatctca

SEQ ID NO: 1731 - DNA, 23 bp, synthetic construct
  misc_feature 1..23: note = Synthetic
  source 1..23: mol_type = other DNA
atcggaaccttccagggatctca

SEQ ID NO: 1732 - DNA, 24 bp, synthetic construct
  misc_feature 1..24: note = Synthetic
  source 1..24: mol_type = other DNA
catcggaaccttccagggatctca

SEQ ID NO: 1733 - DNA, 25 bp, synthetic construct
  misc_feature 1..25: note = Synthetic
  source 1..25: mol_type = other DNA
tcatcggaaccttccagggatctca

SEQ ID NO: 1734 - DNA, 21 bp, synthetic construct
  misc_feature 1..21: note = Synthetic
  source 1..21: mol_type = other DNA
tcggaaccttccagggatctc

SEQ ID NO: 1735 - DNA, 22 bp, synthetic construct
  misc_feature 1..22: note = Synthetic
  source 1..22: mol_type = other DNA
atcggaaccttccagggatctc

SEQ ID NO: 1736 - DNA, 23 bp, synthetic construct
  misc_feature 1..23: note = Synthetic
  source 1..23: mol_type = other DNA
catcggaaccttccagggatctc

SEQ ID NO: 1737 - DNA, 24 bp, synthetic construct
  misc_feature 1..24: note = Synthetic
  source 1..24: mol_type = other DNA
tcatcggaaccttccagggatctc

SEQ ID NO: 1738 - DNA, 22 bp, synthetic construct
  misc_feature 1..22: note = Synthetic
  source 1..22: mol_type = other DNA
catcggaaccttccagggatct

SEQ ID NO: 1739 - DNA, 23 bp, synthetic construct
  misc_feature 1..23: note = Synthetic
  source 1..23: mol_type = other DNA
tcatcggaaccttccagggatct

SEQ ID NO: 1740 - DNA, 20 bp, synthetic construct
  misc_feature 1..20: note = Synthetic
  source 1..20: mol_type = other DNA
atcggaaccttccagggatc

SEQ ID NO: 1741 - DNA, 21 bp, synthetic construct
  misc_feature 1..21: note = Synthetic
  source 1..21: mol_type = other DNA
catcggaaccttccagggatc

SEQ ID NO: 1742 - DNA, 22 bp, synthetic construct
  misc_feature 1..22: note = Synthetic
  source 1..22: mol_type = other DNA
tcatcggaaccttccagggatc

SEQ ID NO: 1743 - DNA, 21 bp, synthetic construct
  misc_feature 1..21: note = Synthetic
  source 1..21: mol_type = other DNA
tcatcggaaccttccagggat

SEQ ID NO: 1744 - DNA, 20 bp, synthetic construct
  misc_feature 1..20: note = Synthetic
  source 1..20: mol_type = other DNA
tcatcggaaccttccaggga

SEQ ID NO: 1745 - DNA, 21 bp, synthetic construct
  misc_feature 1..21: note = Synthetic
  source 1..21: mol_type = other DNA
tggacttttctggtatcatct

SEQ ID NO: 1746 - DNA, 22 bp, synthetic construct
  misc_feature 1..22: note = Synthetic
  source 1..22: mol_type = other DNA
gtggacttttctggtatcatct

SEQ ID NO: 1747 - DNA, 25 bp, synthetic construct
  misc_feature 1..25: note = Synthetic
  source 1..25: mol_type = other DNA
catgtggacttttctggtatcatct

SEQ ID NO: 1748 - DNA, 23 bp, synthetic construct
  misc_feature 1..23: note = Synthetic
  source 1..23: mol_type = other DNA
gatattctctgttatcatgtgga

SEQ ID NO: 1749 - DNA, 21 bp, synthetic construct
  misc_feature 1..21: note = Synthetic
  source 1..21: mol_type = other DNA
ggacattggcagttgtttcag

SEQ ID NO: 1750 - DNA, 22 bp, synthetic construct
  misc_feature 1..22: note = Synthetic
  source 1..22: mol_type = other DNA
aggacattggcagttgtttcag

SEQ ID NO: 1751 - DNA, 23 bp, synthetic construct
  misc_feature 1..23: note = Synthetic
  source 1..23: mol_type = other DNA
taggacattggcagttgtttcag

SEQ ID NO: 1752 - DNA, 20 bp, synthetic construct
  misc_feature 1..20: note = Synthetic
  source 1..20: mol_type = other DNA
catcctgtaggacattggca

SEQ ID NO: 1753 - DNA, 21 bp, synthetic construct
  misc_feature 1..21: note = Synthetic
  source 1..21: mol_type = other DNA
tagcatcctgtaggacattgg

SEQ ID NO: 1754 - DNA, 23 bp, synthetic construct
  misc_feature 1..23: note = Synthetic
  source 1..23: mol_type = other DNA
ggtagcatcctgtaggacattgg

SEQ ID NO: 1755 - DNA, 24 bp, synthetic construct
  misc_feature 1..24: note = Synthetic
  source 1..24: mol_type = other DNA
atcagctcttttactcccttggag

SEQ ID NO: 1756 - DNA, 22 bp, synthetic construct
  misc_feature 1..22: note = Synthetic
  source 1..22: mol_type = other DNA
tcagctcttttactcccttgga

SEQ ID NO: 1757 - DNA, 23 bp, synthetic construct
  misc_feature 1..23: note = Synthetic
  source 1..23: mol_type = other DNA
atcagctcttttactcccttgga

SEQ ID NO: 1758 - DNA, 20 bp, synthetic construct
  misc_feature 1..20: note = Synthetic
  source 1..20: mol_type = other DNA
cagctcttttactcccttgg

SEQ ID NO: 1759 - DNA, 25 bp, synthetic construct
  misc_feature 1..25: note = Synthetic
  source 1..25: mol_type = other DNA
ttcatcagctcttttactcccttgg

SEQ ID NO: 1760 - DNA, 22 bp, synthetic construct
  misc_feature 1..22: note = Synthetic
  source 1..22: mol_type = other DNA
catcagctcttttactcccttg

SEQ ID NO: 1761 - DNA, 25 bp, synthetic construct
  misc_feature 1..25: note = Synthetic
  source 1..25: mol_type = other DNA
tttcatcagctcttttactcccttg

SEQ ID NO: 1762 - DNA, 21 bp, synthetic construct
  misc_feature 1..21: note = Synthetic
  source 1..21: mol_type = other DNA
tcatcagctcttttactccct

SEQ ID NO: 1763 - DNA, 22 bp, synthetic construct
  misc_feature 1..22: note = Synthetic
  source 1..22: mol_type = other DNA
ttcatcagctcttttactccct

SEQ ID NO: 1764 - DNA, 23 bp, synthetic construct
  misc_feature 1..23: note = Synthetic
  source 1..23: mol_type = other DNA
ttgccattgtttcatcagctctt

SEQ ID NO: 1765 - DNA, 24 bp, synthetic construct
  misc_feature 1..24: note = Synthetic
  source 1..24: mol_type = other DNA
cttgccattgtttcatcagctctt

SEQ ID NO: 1766 - DNA, 25 bp, synthetic construct
  misc_feature 1..25: note = Synthetic
  source 1..25: mol_type = other DNA
acttgccattgtttcatcagctctt

SEQ ID NO: 1767 - DNA, 22 bp, synthetic construct
  misc_feature 1..22: note = Synthetic
  source 1..22: mol_type = other DNA
gacttacttgccattgtttcat

SEQ ID NO: 1768 - DNA, 25 bp, synthetic construct
  misc_feature 1..25: note = Synthetic
  source 1..25: mol_type = other DNA
gtgtgagcttcaatttcaccttgga

SEQ ID NO: 1769 - DNA, 24 bp, synthetic construct
  misc_feature 1..24: note = Synthetic
  source 1..24: mol_type = other DNA
gtgtgagcttcaatttcaccttgg

SEQ ID NO: 1770 - DNA, 25 bp, synthetic construct
  misc_feature 1..25: note = Synthetic
  source 1..25: mol_type = other DNA
tgtgtgagcttcaatttcaccttgg

SEQ ID NO: 1771 - DNA, 25 bp, synthetic construct
  misc_feature 1..25: note = Synthetic
  source 1..25: mol_type = other DNA
ctgtgtgagcttcaatttcaccttg

SEQ ID NO: 1772 - DNA, 25 bp, synthetic construct
  misc_feature 1..25: note = Synthetic
  source 1..25: mol_type = other DNA
tctgtgtgagcttcaatttcacctt

SEQ ID NO: 1773 - DNA, 24 bp, synthetic construct
  misc_feature 1..24: note = Synthetic
  source 1..24: mol_type = other DNA
tctgtgtgagcttcaatttcacct

SEQ ID NO: 1774 - DNA, 25 bp, synthetic construct
  misc_feature 1..25: note = Synthetic
  source 1..25: mol_type = other DNA
atctgtgtgagcttcaatttcacct

SEQ ID NO: 1775 - DNA, 25 bp, synthetic construct
  misc_feature 1..25: note = Synthetic
  source 1..25: mol_type = other DNA
gctgttttcatccaggttgtgataa

SEQ ID NO: 1776 - DNA, 24 bp, synthetic construct
  misc_feature 1..24: note = Synthetic
  source 1..24: mol_type = other DNA
ggattttttggctgttttcatcca

SEQ ID NO: 1777 - DNA, 25 bp, synthetic construct
  misc_feature 1..25: note = Synthetic
  source 1..25: mol_type = other DNA
aggattttttggctgttttcatcca

SEQ ID NO: 1778 - DNA, 23 bp, synthetic construct
  misc_feature 1..23: note = Synthetic
  source 1..23: mol_type = other DNA
cggaaccttccagggatctcagg

SEQ ID NO: 1779 - DNA, 22 bp, synthetic construct
  misc_feature 1..22: note = Synthetic
  source 1..22: mol_type = other DNA
cggaaccttccagggatctcag

SEQ ID NO: 1780 - DNA, 25 bp, synthetic construct
  misc_feature 1..25: note = Synthetic
  source 1..25: mol_type = other DNA
atcatcggaaccttccagggatctc

SEQ ID NO: 1781 - DNA, 24 bp, synthetic construct
  misc_feature 1..24: note = Synthetic
  source 1..24: mol_type = other DNA
atcatcggaaccttccagggatct

SEQ ID NO: 1782 - DNA, 23 bp, synthetic construct
  misc_feature 1..23: note = Synthetic
  source 1..23: mol_type = other DNA
atcatcggaaccttccagggatc

SEQ ID NO: 1783 - DNA, 25 bp, synthetic construct
  misc_feature 1..25: note = Synthetic
  source 1..25: mol_type = other DNA
gcatcatcggaaccttccagggatc

SEQ ID NO: 1784 - DNA, 22 bp, synthetic construct
  misc_feature 1..22: note = Synthetic
  source 1..22: mol_type = other DNA
atcatcggaaccttccagggat

SEQ ID NO: 1785 - DNA, 24 bp, synthetic construct
  misc_feature 1..24: note = Synthetic
  source 1..24: mol_type = other DNA
gcatcatcggaaccttccagggat

SEQ ID NO: 1786 - DNA, 25 bp, synthetic construct
  misc_feature 1..25: note = Synthetic
  source 1..25: mol_type = other DNA
tgcatcatcggaaccttccagggat

SEQ ID NO: 1787 - DNA, 21 bp, synthetic construct
  misc_feature 1..21: note = Synthetic
  source 1..21: mol_type = other DNA
atcatcggaaccttccaggga

SEQ ID NO: 1788 - DNA, 23 bp, synthetic construct
  misc_feature 1..23: note = Synthetic
  source 1..23: mol_type = other DNA
gcatcatcggaaccttccaggga

SEQ ID NO: 1789 - DNA, 24 bp, synthetic construct
  misc_feature 1..24: note = Synthetic
  source 1..24: mol_type = other DNA
tgcatcatcggaaccttccaggga

SEQ ID NO: 1790 - DNA, 22 bp, synthetic construct
  misc_feature 1..22: note = Synthetic
  source 1..22: mol_type = other DNA
gcatcatcggaaccttccaggg

SEQ ID NO: 1791 - DNA, 23 bp, synthetic construct
  misc_feature 1..23: note = Synthetic
  source 1..23: mol_type = other DNA
tgcatcatcggaaccttccaggg

SEQ ID NO: 1792 - DNA, 20 bp, synthetic construct
  misc_feature 1..20: note = Synthetic
  source 1..20: mol_type = other DNA
gcatcatcggaaccttccag

SEQ ID NO: 1793 - DNA, 21 bp, synthetic construct
  misc_feature 1..21: note = Synthetic
  source 1..21: mol_type = other DNA
tgcatcatcggaaccttccag

SEQ ID NO: 1794 - DNA, 20 bp, synthetic construct
  misc_feature 1..20: note = Synthetic
  source 1..20: mol_type = other DNA
tgcatcatcggaaccttcca

SEQ ID NO: 1795 - DNA, 25 bp, synthetic construct
  misc_feature 1..25: note = Synthetic
  source 1..25: mol_type = other DNA
gcagttgtttcagcttctgtaagcc

SEQ ID NO: 1796 - DNA, 22 bp, synthetic construct
  misc_feature 1..22: note = Synthetic
  source 1..22: mol_type = other DNA
tttcatcagctcttttactccc

SEQ ID NO: 1797 - DNA, 23 bp, synthetic construct
  misc_feature 1..23: note = Synthetic
  source 1..23: mol_type = other DNA
gtttcatcagctcttttactccc

SEQ ID NO: 1798 - DNA, 25 bp, synthetic construct
  misc_feature 1..25: note = Synthetic
  source 1..25: mol_type = other DNA
ttgccattgtttcatcagctctttt

SEQ ID NO: 1799 - DNA, 21 bp, synthetic construct
  misc_feature 1..21: note = Synthetic
  source 1..21: mol_type = other DNA
aggactgcatcatcggaacct

SEQ ID NO: 1800 - DNA, 22 bp, synthetic construct
  misc_feature 1..22: note = Synthetic
  source 1..22: mol_type = other DNA
caggactgcatcatcggaacct

SEQ ID NO: 1801 - DNA, 20 bp, synthetic construct
  misc_feature 1..20: note = Synthetic
  source 1..20: mol_type = other DNA
aggactgcatcatcggaacc

SEQ ID NO: 1802 - DNA, 21 bp, synthetic construct
  misc_feature 1..21: note = Synthetic
  source 1..21: mol_type = other DNA
caggactgcatcatcggaacc

SEQ ID NO: 1803 - DNA, 21 bp, synthetic construct
  misc_feature 1..21: note = Synthetic
  source 1..21: mol_type = other DNA
ggacttttctggtatcatctg

SEQ ID NO: 1804 - DNA, 22 bp, synthetic construct
  misc_feature 1..22: note = Synthetic
  source 1..22: mol_type = other DNA
tggacttttctggtatcatctg

SEQ ID NO: 1805 - DNA, 23 bp, synthetic construct
  misc_feature 1..23: note = Synthetic
  source 1..23: mol_type = other DNA
gtggacttttctggtatcatctg

SEQ ID NO: 1806 - DNA, 21 bp, synthetic construct
  misc_feature 1..21: note = Synthetic
  source 1..21: mol_type = other DNA
gtagcatcctgtaggacattg

SEQ ID NO: 1807 - DNA, 22 bp, synthetic construct
  misc_feature 1..22: note = Synthetic
  source 1..22: mol_type = other DNA
tcatcagctcttttactccctt

SEQ ID NO: 1808 - DNA, 23 bp, synthetic construct
  misc_feature 1..23: note = Synthetic
  source 1..23: mol_type = other DNA
ttcatcagctcttttactccctt

SEQ ID NO: 1809 - DNA, 24 bp, synthetic construct
  misc_feature 1..24: note = Synthetic
  source 1..24: mol_type = other DNA
tttcatcagctcttttactccctt

SEQ ID NO: 1810 - DNA, 25 bp, synthetic construct
  misc_feature 1..25: note = Synthetic
  source 1..25: mol_type = other DNA
gtttcatcagctcttttactccctt

SEQ ID NO: 1811 - DNA, 23 bp, synthetic construct
  misc_feature 1..23: note = Synthetic
  source 1..23: mol_type = other DNA
tgccattgtttcatcagctcttt

SEQ ID NO: 1812 - DNA, 24 bp, synthetic construct
  misc_feature 1..24: note = Synthetic
  source 1..24: mol_type = other DNA
ttgccattgtttcatcagctcttt

SEQ ID NO: 1813 - DNA, 25 bp, synthetic construct
  misc_feature 1..25: note = Synthetic
  source 1..25: mol_type = other DNA
cttgccattgtttcatcagctcttt

SEQ ID NO: 1814 - DNA, 23 bp, synthetic construct
  misc_feature 1..23: note = Synthetic
  source 1..23: mol_type = other DNA
tgacttacttgccattgtttcat

SEQ ID NO: 1815 - DNA, 24 bp, synthetic construct
  misc_feature 1..24: note = Synthetic
  source 1..24: mol_type = other DNA
gcaactattttgttttgtccctgg

SEQ ID NO: 1816 - DNA, 22 bp, synthetic construct
  misc_feature 1..22: note = Synthetic
  source 1..22: mol_type = other DNA
gaatgtgaatttggagaattgc

SEQ ID NO: 1817 - DNA, 22 bp, synthetic construct
  misc_feature 1..22: note = Synthetic
  source 1..22: mol_type = other DNA
tgaatgtgaatttggagaattg

SEQ ID NO: 1818 - DNA, 22 bp, synthetic construct
  misc_feature 1..22: note = Synthetic
  source 1..22: mol_type = other DNA
gatgaatgtgaatttggagaat

SEQ ID NO: 1819 - DNA, 25 bp, synthetic construct
  misc_feature 1..25: note = Synthetic
  source 1..25: mol_type = other DNA
catctgtgtgagcttcaatttcacc

SEQ ID NO: 1820 - DNA, 25 bp, synthetic construct
  misc_feature 1..25: note = Synthetic
  source 1..25: mol_type = other DNA
aggttgtgataaacatctgtgtgag

SEQ ID NO: 1821 - DNA, 21 bp, synthetic construct
  misc_feature 1..21: note = Synthetic
  source 1..21: mol_type = other DNA
ggctgttttcatccaggttgt

SEQ ID NO: 1822 - DNA, 22 bp, synthetic construct
  misc_feature 1..22: note = Synthetic
  source 1..22: mol_type = other DNA
tggctgttttcatccaggttgt

SEQ ID NO: 1823 - DNA, 23 bp, synthetic construct
  misc_feature 1..23: note = Synthetic
  source 1..23: mol_type = other DNA
ttggctgttttcatccaggttgt

SEQ ID NO: 1824 - DNA, 25 bp, synthetic construct
  misc_feature 1..25: note = Synthetic
  source 1..25: mol_type = other DNA
ggattttttggctgttttcatccag

SEQ ID NO: 1825 - DNA, 25 bp, synthetic construct
  misc_feature 1..25: note = Synthetic
  source 1..25: mol_type = other DNA
catcatcggaaccttccagggatct

SEQ ID NO: 1826 - DNA, 24 bp, synthetic construct
  misc_feature 1..24: note = Synthetic
  source 1..24: mol_type = other DNA
catcatcggaaccttccagggatc

SEQ ID NO: 1827 - DNA, 23 bp, synthetic construct
  misc_feature 1..23: note = Synthetic
  source 1..23: mol_type = other DNA
catcatcggaaccttccagggat

SEQ ID NO: 1828 - DNA, 22 bp, synthetic construct
  misc_feature 1..22: note = Synthetic
  source 1..22: mol_type = other DNA
catcatcggaaccttccaggga

SEQ ID NO: 1829 - DNA, 25 bp, synthetic construct
  misc_feature 1..25: note = Synthetic
  source 1..25: mol_type = other DNA
ctgcatcatcggaaccttccaggga

SEQ ID NO: 1830 - DNA, 21 bp, synthetic construct
  misc_feature 1..21: note = Synthetic
  source 1..21: mol_type = other DNA
catcatcggaaccttccaggg

SEQ ID NO: 1831 - DNA, 24 bp, synthetic construct
  misc_feature 1..24: note = Synthetic
  source 1..24: mol_type = other DNA
ctgcatcatcggaaccttccaggg

SEQ ID NO: 1832 - DNA, 22 bp, synthetic construct
  misc_feature 1..22: note = Synthetic
  source 1..22: mol_type = other DNA
ctgcatcatcggaaccttccag

SEQ ID NO: 1833 - DNA, 21 bp, synthetic construct
  misc_feature 1..21: note = Synthetic
  source 1..21: mol_type = other DNA
ctgcatcatcggaaccttcca

SEQ ID NO: 1834 - DNA, 25 bp, synthetic construct
  misc_feature 1..25: note = Synthetic
  source 1..25: mol_type = other DNA
gtctttgtaacaggactgcatcatc

SEQ ID NO: 1835 - DNA, 25 bp, synthetic construct
  misc_feature 1..25: note = Synthetic
  source 1..25: mol_type = other DNA
ggcagttgtttcagcttctgtaagc

SEQ ID NO: 1836 - DNA, 24 bp, synthetic construct
  misc_feature 1..24: note = Synthetic
  source 1..24: mol_type = other DNA
tgtttcatcagctcttttactccc

SEQ ID NO: 1837 - DNA, 25 bp, synthetic construct
  misc_feature 1..25: note = Synthetic
  source 1..25: mol_type = other DNA
cattgtttcatcagctcttttactc

SEQ ID NO: 1838 - DNA, 24 bp, synthetic construct
  misc_feature 1..24: note = Synthetic
  source 1..24: mol_type = other DNA
gccattgtttcatcagctctttta

SEQ ID NO: 1839 - DNA, 23 bp, synthetic construct
  misc_feature 1..23: note = Synthetic
  source 1..23: mol_type = other DNA
gctgagaattgttcaattggatc

SEQ ID NO: 1840 - DNA, 23 bp, synthetic construct
  misc_feature 1..23: note = Synthetic
  source 1..23: mol_type = other DNA
caggactgcatcatcggaacctt

SEQ ID NO: 1841 - DNA, 20 bp, synthetic construct
  misc_feature 1..20: note = Synthetic
  source 1..20: mol_type = other DNA
tcagctcttttactcccttg

SEQ ID NO: 1842 - DNA, 25 bp, synthetic construct
  misc_feature 1..25: note = Synthetic
  source 1..25: mol_type = other DNA
tgtttcatcagctcttttactccct

SEQ ID NO: 1843 - DNA, 25 bp, synthetic construct
  misc_feature 1..25: note = Synthetic
  source 1..25: mol_type = other DNA
gcaactattttgttttgtccctggc

SEQ ID NO: 1844 - DNA, 23 bp, synthetic construct
  misc_feature 1..23: note = Synthetic
  source 1..23: mol_type = other DNA
gaatgtgaatttggagaattgca

SEQ ID NO: 1845 - DNA, 23 bp, synthetic construct
  misc_feature 1..23: note = Synthetic
  source 1..23: mol_type = other DNA
tgaatgtgaatttggagaattgc

SEQ ID NO: 1846 - DNA, 23 bp, synthetic construct
  misc_feature 1..23: note = Synthetic
  source 1..23: mol_type = other DNA
gatgaatgtgaatttggagaatt

SEQ ID NO: 1847 - DNA, 23 bp, synthetic construct
  misc_feature 1..23: note = Synthetic
  source 1..23: mol_type = other DNA
cgatgaatgtgaatttggagaat

SEQ ID NO: 1848 - DNA, 22 bp, synthetic construct
  misc_feature 1..22: note = Synthetic
  source 1..22: mol_type = other DNA
cgatgaatgtgaatttggagaa

SEQ ID NO: 1849 - DNA, 21 bp, synthetic construct
  misc_feature 1..21: note = Synthetic
  source 1..21: mol_type = other DNA
cgatgaatgtgaatttggaga

SEQ ID NO: 1850 - DNA, 25 bp, synthetic construct
  misc_feature 1..25: note = Synthetic
  source 1..25: mol_type = other DNA
gaagaagaatatgtgcagaattacc

SEQ ID NO: 1851 - DNA, 25 bp, synthetic construct
  misc_feature 1..25: note = Synthetic
  source 1..25: mol_type = other DNA
ggttgtgataaacatctgtgtgagc

SEQ ID NO: 1852 - DNA, 21 bp, synthetic construct
  misc_feature 1..21: note = Synthetic
  source 1..21: mol_type = other DNA
ctgttttcatccaggttgtga

SEQ ID NO: 1853 - DNA, 22 bp, synthetic construct
  misc_feature 1..22: note = Synthetic
  source 1..22: mol_type = other DNA
ggctgttttcatccaggttgtg

SEQ ID NO: 1854 - DNA, 23 bp, synthetic construct
  misc_feature 1..23: note = Synthetic
  source 1..23: mol_type = other DNA
tggctgttttcatccaggttgtg

SEQ ID NO: 1855 - DNA, 24 bp, synthetic construct
  misc_feature 1..24: note = Synthetic
  source 1..24: mol_type = other DNA
ttggctgttttcatccaggttgtg

SEQ ID NO: 1856 - DNA, 24 bp, synthetic construct
  misc_feature 1..24: note = Synthetic
  source 1..24: mol_type = other DNA
tttggctgttttcatccaggttgt

SEQ ID NO: 1857 - DNA, 25 bp, synthetic construct
  misc_feature 1..25: note = Synthetic
  source 1..25: mol_type = other DNA
gattttttggctgttttcatccagg

SEQ ID NO: 1858 - DNA, 25 bp, synthetic construct
  misc_feature 1..25: note = Synthetic
  source 1..25: mol_type = other DNA
actgcatcatcggaaccttccaggg

SEQ ID NO: 1859 - DNA, 22 bp, synthetic construct
  misc_feature 1..22: note = Synthetic
  source 1..22: mol_type = other DNA
actgcatcatcggaaccttcca

SEQ ID NO: 1860 - DNA, 25 bp, synthetic construct
  misc_feature 1..25: note = Synthetic
  source 1..25: mol_type = other DNA
aggactgcatcatcggaaccttcca

SEQ ID NO: 1861 - DNA, 24 bp, synthetic construct
  misc_feature 1..24: note = Synthetic
  source 1..24: mol_type = other DNA
aggactgcatcatcggaaccttcc

SEQ ID NO: 1862 - DNA, 25 bp, synthetic construct
  misc_feature 1..25: note = Synthetic
  source 1..25: mol_type = other DNA
caggactgcatcatcggaaccttcc

SEQ ID NO: 1863 - DNA, 20 bp, synthetic construct
  misc_feature 1..20: note = Synthetic
  source 1..20: mol_type = other DNA
actgcatcatcggaaccttc

SEQ ID NO: 1864 - DNA, 25 bp, synthetic construct
  misc_feature 1..25: note = Synthetic
  source 1..25: mol_type = other DNA
tgtaacaggactgcatcatcggaac

SEQ ID NO: 1865 - DNA, 25 bp, synthetic construct
  misc_feature 1..25: note = Synthetic
  source 1..25: mol_type = other DNA
ttgtttcatcagctcttttactccc

SEQ ID NO: 1866 - DNA, 24 bp, synthetic construct
  misc_feature 1..24: note = Synthetic
  source 1..24: mol_type = other DNA
gctgagaattgttcaattggatcc

SEQ ID NO: 1867 - DNA, 24 bp, synthetic construct
  misc_feature 1..24: note = Synthetic
  source 1..24: mol_type = other DNA
caggactgcatcatcggaaccttc

SEQ ID NO: 1868 - DNA, 24 bp, synthetic construct
  misc_feature 1..24: note = Synthetic
  source 1..24: mol_type = other DNA
aacaggactgcatcatcggaacct

SEQ ID NO: 1869 - DNA, 23 bp, synthetic construct
  misc_feature 1..23: note = Synthetic
  source 1..23: mol_type = other DNA
aacaggactgcatcatcggaacc

SEQ ID NO: 1870 - DNA, 21 bp, synthetic construct
  misc_feature 1..21: note = Synthetic
  source 1..21: mol_type = other DNA
atcagctcttttactcccttg

SEQ ID NO: 1871 - DNA, 25 bp, synthetic construct
  misc_feature 1..25: note = Synthetic
  source 1..25: mol_type = other DNA
gttcaattggatccacaagagtgct

SEQ ID NO: 1872 - DNA, 21 bp, synthetic construct
  misc_feature 1..21: note = Synthetic
  source 1..21: mol_type = other DNA
ctattttgttttgtccctggc

SEQ ID NO: 1873 - DNA, 24 bp, synthetic construct
  misc_feature 1..24: note = Synthetic
  source 1..24: mol_type = other DNA
gaatgtgaatttggagaattgcaa

SEQ ID NO: 1874 - DNA, 24 bp, synthetic construct
  misc_feature 1..24: note = Synthetic
  source 1..24: mol_type = other DNA
tgaatgtgaatttggagaattgca

SEQ ID NO: 1875 - DNA, 24 bp, synthetic construct
  misc_feature 1..24: note = Synthetic
  source 1..24: mol_type = other DNA
atgaatgtgaatttggagaattgc

SEQ ID NO: 1876 - DNA, 24 bp, synthetic construct
  misc_feature 1..24: note = Synthetic
  source 1..24: mol_type = other DNA
gatgaatgtgaatttggagaattg

SEQ ID NO: 1877 - DNA, 24 bp, synthetic construct
  misc_feature 1..24: note = Synthetic
  source 1..24: mol_type = other DNA
cgatgaatgtgaatttggagaatt

SEQ ID NO: 1878 - DNA, 24 bp, synthetic construct
  misc_feature 1..24: note = Synthetic
  source 1..24: mol_type = other DNA
gcgatgaatgtgaatttggagaat

SEQ ID NO: 1879 - DNA, 23 bp, synthetic construct
  misc_feature 1..23: note = Synthetic
  source 1..23: mol_type = other DNA
gcgatgaatgtgaatttggagaa

SEQ ID NO: 1880 - DNA, 22 bp, synthetic construct
  misc_feature 1..22: note = Synthetic
  source 1..22: mol_type = other DNA
gcgatgaatgtgaatttggaga

SEQ ID NO: 1881 - DNA, 25 bp, synthetic construct
  misc_feature 1..25: note = Synthetic
  source 1..25: mol_type = other DNA
acatctgtgtgagcttcaatttcac

SEQ ID NO: 1882 - DNA, 23 bp, synthetic construct
  misc_feature 1..23: note = Synthetic
  source 1..23: mol_type = other DNA
ctgttttcatccaggttgtgata

SEQ ID NO: 1883 - DNA, 22 bp, synthetic construct
  misc_feature 1..22: note = Synthetic
  source 1..22: mol_type = other DNA
ctgttttcatccaggttgtgat

SEQ ID NO: 1884 - DNA, 25 bp, synthetic construct
  misc_feature 1..25: note = Synthetic
  source 1..25: mol_type = other DNA
gactgcatcatcggaaccttccagg

SEQ ID NO: 1885 - DNA, 24 bp, synthetic construct
  misc_feature 1..24: note = Synthetic
  source 1..24: mol_type = other DNA
gactgcatcatcggaaccttccag

SEQ ID NO: 1886 - DNA, 23 bp, synthetic construct
  misc_feature 1..23: note = Synthetic
  source 1..23: mol_type = other DNA
gactgcatcatcggaaccttcca

SEQ ID NO: 1887 - DNA, 22 bp, synthetic construct
  misc_feature 1..22: note = Synthetic
  source 1..22: mol_type = other DNA
gactgcatcatcggaaccttcc

SEQ ID NO: 1888 - DNA, 25 bp, synthetic construct
  misc_feature 1..25: note = Synthetic
  source 1..25: mol_type = other DNA
attgtttcatcagctcttttactcc

SEQ ID NO: 1889 - DNA, 22 bp, synthetic construct
  misc_feature 1..22: note = Synthetic
  source 1..22: mol_type = other DNA
gaattgttcaattggatccaca

SEQ ID NO: 1890 - DNA, 25 bp, synthetic construct
  misc_feature 1..25: note = Synthetic
  source 1..25: mol_type = other DNA
aacaggactgcatcatcggaacctt

SEQ ID NO: 1891 - DNA, 20 bp, synthetic construct
  misc_feature 1..20: note = Synthetic
  source 1..20: mol_type = other DNA
cagtttcaccaccccattat

SEQ ID NO: 1892 - DNA, 25 bp, synthetic construct
  misc_feature 1..25: note = Synthetic
  source 1..25: mol_type = other DNA
tgttcaattggatccacaagagtgc

SEQ ID NO: 1893 - DNA, 23 bp, synthetic construct
  misc_feature 1..23: note = Synthetic
  source 1..23: mol_type = other DNA
ctgagaattgttcaattggatcc

SEQ ID NO: 1894 - DNA, 22 bp, synthetic construct
  misc_feature 1..22: note = Synthetic
  source 1..22: mol_type = other DNA
actattttgttttgtccctggc

SEQ ID NO: 1895 - DNA, 25 bp, synthetic construct
  misc_feature 1..25: note = Synthetic
  source 1..25: mol_type = other DNA
gaatgtgaatttggagaattgcaaa

SEQ ID NO: 1896 - DNA, 25 bp, synthetic construct
  misc_feature 1..25: note = Synthetic
  source 1..25: mol_type = other DNA
tgaatgtgaatttggagaattgcaa

SEQ ID NO: 1897 - DNA, 25 bp, synthetic construct
  misc_feature 1..25: note = Synthetic
  source 1..25: mol_type = other DNA
atgaatgtgaatttggagaattgca

SEQ ID NO: 1898 - DNA, 25 bp, synthetic construct
  misc_feature 1..25: note = Synthetic
  source 1..25: mol_type = other DNA
gatgaatgtgaatttggagaattgc

SEQ ID NO: 1899 - DNA, 25 bp, synthetic construct
  misc_feature 1..25: note = Synthetic
  source 1..25: mol_type = other DNA
cgatgaatgtgaatttggagaattg

SEQ ID NO: 1900 - DNA, 25 bp, synthetic construct
  misc_feature 1..25: note = Synthetic
  source 1..25: mol_type = other DNA
gcgatgaatgtgaatttggagaatt

SEQ ID NO: 1901 - DNA, 25 bp, synthetic construct
  misc_feature 1..25: note = Synthetic
  source 1..25: mol_type = other DNA
agcgatgaatgtgaatttggagaat

SEQ ID NO: 1902 - DNA, 23 bp, synthetic construct
  misc_feature 1..23: note = Synthetic
  source 1..23: mol_type = other DNA
agcgatgaatgtgaatttggaga

SEQ ID NO: 1903 - DNA, 20 bp, synthetic construct
  misc_feature 1..20: note = Synthetic
  source 1..20: mol_type = other DNA
gcgatgaatgtgaatttgga

SEQ ID NO: 1904 - DNA, 24 bp, synthetic construct
  misc_feature 1..24: note = Synthetic
  source 1..24: mol_type = other DNA
ctgttttcatccaggttgtgataa

SEQ ID NO: 1905 - DNA, 24 bp, synthetic construct
  misc_feature 1..24: note = Synthetic
  source 1..24: mol_type = other DNA
gctgttttcatccaggttgtgata

SEQ ID NO: 1906 - DNA, 23 bp, synthetic construct
  misc_feature 1..23: note = Synthetic
  source 1..23: mol_type = other DNA
agaattgttcaattggatccaca

SEQ ID NO: 1907 - DNA, 21 bp, synthetic construct
  misc_feature 1..21: note = Synthetic
  source 1..21: mol_type = other DNA
gaattgttcaattggatccac

SEQ ID NO: 1908 - DNA, 23 bp, synthetic construct
  misc_feature 1..23: note = Synthetic
  source 1..23: mol_type = other DNA
atgctgagaattgttcaattgga

SEQ ID NO: 1909 - DNA, 21 bp, synthetic construct
  misc_feature 1..21: note = Synthetic
  source 1..21: mol_type = other DNA
actattttgttttgtccctgg

SEQ ID NO: 1910 - DNA, 21 bp, synthetic construct
  misc_feature 1..21: note = Synthetic
  source 1..21: mol_type = other DNA
cagtttcaccaccccattatt

SEQ ID NO: 1911 - DNA, 24 bp, synthetic construct
  misc_feature 1..24: note = Synthetic
  source 1..24: mol_type = other DNA
ctgagaattgttcaattggatcca

SEQ ID NO: 1912 - DNA, 23 bp, synthetic construct
  misc_feature 1..23: note = Synthetic
  source 1..23: mol_type = other DNA
actattttgttttgtccctggct

SEQ ID NO: 1913 - DNA, 23 bp, synthetic construct
  misc_feature 1..23: note = Synthetic
  source 1..23: mol_type = other DNA
aactattttgttttgtccctggc

SEQ ID NO: 1914 - DNA, 24 bp, synthetic construct
  misc_feature 1..24: note = Synthetic
  source 1..24: mol_type = other DNA
agcgatgaatgtgaatttggagaa

SEQ ID NO: 1915 - DNA, 24 bp, synthetic construct
  misc_feature 1..24: note = Synthetic
  source 1..24: mol_type = other DNA
aagcgatgaatgtgaatttggaga

SEQ ID NO: 1916 - DNA, 21 bp, synthetic construct
  misc_feature 1..21: note = Synthetic
  source 1..21: mol_type = other DNA
gcgatgaatgtgaatttggag

SEQ ID NO: 1917 - DNA, 21 bp, synthetic construct
  misc_feature 1..21: note = Synthetic
  source 1..21: mol_type = other DNA
agcgatgaatgtgaatttgga

SEQ ID NO: 1918 - DNA, 25 bp, synthetic construct
  misc_feature 1..25: note = Synthetic
  source 1..25: mol_type = other DNA
ggaagaagaatatgtgcagaattac

SEQ ID NO: 1919 - DNA, 25 bp, synthetic construct
  misc_feature 1..25: note = Synthetic
  source 1..25: mol_type = other DNA
ctgttttcatccaggttgtgataaa

SEQ ID NO: 1920 - DNA, 22 bp, synthetic construct
  misc_feature 1..22: note = Synthetic
  source 1..22: mol_type = other DNA
agaattgttcaattggatccac

SEQ ID NO: 1921 - DNA, 24 bp, synthetic construct
  misc_feature 1..24: note = Synthetic
  source 1..24: mol_type = other DNA
aatgctgagaattgttcaattgga

SEQ ID NO: 1922 - DNA, 22 bp, synthetic construct
  misc_feature 1..22: note = Synthetic
  source 1..22: mol_type = other DNA
aactattttgttttgtccctgg

SEQ ID NO: 1923 - DNA, 22 bp, synthetic construct
  misc_feature 1..22: note = Synthetic
  source 1..22: mol_type = other DNA
aagcgatgaatgtgaatttgga

SEQ ID NO: 1924 - DNA, 22 bp, synthetic construct
  misc_feature 1..22: note = Synthetic
  source 1..22: mol_type = other DNA
caagcgatgaatgtgaatttgg

SEQ ID NO: 1925 - DNA, 23 bp, synthetic construct
  misc_feature 1..23: note = Synthetic
  source 1..23: mol_type = other DNA
gaagaatatgtgcagaattacca

SEQ ID NO: 1926 - DNA, 25 bp, synthetic construct
  misc_feature 1..25: note = Synthetic
  source 1..25: mol_type = other DNA
ctgagaattgttcaattggatccac

SEQ ID NO: 1927 - DNA, 25 bp, synthetic construct
  misc_feature 1..25: note = Synthetic
  source 1..25: mol_type = other DNA
gctgagaattgttcaattggatcca

SEQ ID NO: 1928 - DNA, 21 bp, synthetic construct
  misc_feature 1..21: note = Synthetic
  source 1..21: mol_type = other DNA
gagaattgttcaattggatcc

SEQ ID NO: 1929 - DNA, 24 bp, synthetic construct
  misc_feature 1..24: note = Synthetic
  source 1..24: mol_type = other DNA
ctattttgttttgtccctggcttg

SEQ ID NO: 1930 - DNA, 24 bp, synthetic construct
  misc_feature 1..24: note = Synthetic
  source 1..24: mol_type = other DNA
actattttgttttgtccctggctt

SEQ ID NO: 1931 - DNA, 24 bp, synthetic construct
  misc_feature 1..24: note = Synthetic
  source 1..24: mol_type = other DNA
aactattttgttttgtccctggct

SEQ ID NO: 1932 - DNA, 24 bp, synthetic construct
  misc_feature 1..24: note = Synthetic
  source 1..24: mol_type = other DNA
caactattttgttttgtccctggc

SEQ ID NO: 1933 - DNA, 25 bp, synthetic construct
  misc_feature 1..25: note = Synthetic
  source 1..25: mol_type = other DNA
aagcgatgaatgtgaatttggagaa

SEQ ID NO: 1934 - DNA, 25 bp, synthetic construct
  misc_feature 1..25: note = Synthetic
  source 1..25: mol_type = other DNA
caagcgatgaatgtgaatttggaga

SEQ ID NO: 1935 - DNA, 22 bp, synthetic construct
  misc_feature 1..22: note = Synthetic
  source 1..22: mol_type = other DNA
agcgatgaatgtgaatttggag

SEQ ID NO: 1936 - DNA, 20 bp, synthetic construct
  misc_feature 1..20: note = Synthetic
  source 1..20: mol_type = other DNA
caggactgcatcatcggaac

SEQ ID NO: 1937 - DNA, 20 bp, synthetic construct
  misc_feature 1..20: note = Synthetic
  source 1..20: mol_type = other DNA
acaggactgcatcatcggaa

SEQ ID NO: 1938 - DNA, 20 bp, synthetic construct
  misc_feature 1..20: note = Synthetic
  source 1..20: mol_type = other DNA
aacaggactgcatcatcgga

SEQ ID NO: 1939 - DNA, 24 bp, synthetic construct
  misc_feature 1..24: note = Synthetic
  source 1..24: mol_type = other DNA
ttgtaacaggactgcatcatcgga

SEQ ID NO: 1940 - DNA, 25 bp, synthetic construct
  misc_feature 1..25: note = Synthetic
  source 1..25: mol_type = other DNA
tttgtaacaggactgcatcatcgga

SEQ ID NO: 1941 - DNA, 25 bp, synthetic construct
  misc_feature 1..25: note = Synthetic
  source 1..25: mol_type = other DNA
aaatgctgagaattgttcaattgga

SEQ ID NO: 1942 - DNA, 23 bp, synthetic construct
  misc_feature 1..23: note = Synthetic
  source 1..23: mol_type = other DNA
caactattttgttttgtccctgg

SEQ ID NO: 1943 - DNA, 23 bp, synthetic construct
  misc_feature 1..23: note = Synthetic
  source 1..23: mol_type = other DNA
aagcgatgaatgtgaatttggag

SEQ ID NO: 1944 - DNA, 23 bp, synthetic construct
  misc_feature 1..23: note = Synthetic
  source 1..23: mol_type = other DNA
caagcgatgaatgtgaatttgga

SEQ ID NO: 1945 - DNA, 24 bp, synthetic construct
  misc_feature 1..24: note = Synthetic
  source 1..24: mol_type = other DNA
gaagaatatgtgcagaattaccaa

SEQ ID NO: 1946 - DNA, 24 bp, synthetic construct
  misc_feature 1..24: note = Synthetic
  source 1..24: mol_type = other DNA
agaagaatatgtgcagaattacca

SEQ ID NO: 1947 - DNA, 20 bp, synthetic construct
  misc_feature 1..20: note = Synthetic
  source 1..20: mol_type = other DNA
gtttcaccaccccattatta

SEQ ID NO: 1948 - DNA, 22 bp, synthetic construct
  misc_feature 1..22: note = Synthetic
  source 1..22: mol_type = other DNA
gagaattgttcaattggatcca

SEQ ID NO: 1949 - DNA, 25 bp, synthetic construct
  misc_feature 1..25: note = Synthetic
  source 1..25: mol_type = other DNA
actattttgttttgtccctggcttg

SEQ ID NO: 1950 - DNA, 25 bp, synthetic construct
  misc_feature 1..25: note = Synthetic
  source 1..25: mol_type = other DNA
caactattttgttttgtccctggct

SEQ ID NO: 1951 - DNA, 21 bp, synthetic construct
  misc_feature 1..21: note = Synthetic
  source 1..21: mol_type = other DNA
aacaggactgcatcatcggaa

SEQ ID NO: 1952 - DNA, 25 bp, synthetic construct
  misc_feature 1..25: note = Synthetic
  source 1..25: mol_type = other DNA
gaagaatatgtgcagaattaccaaa

SEQ ID NO: 1953 - DNA, 25 bp, synthetic construct
  misc_feature 1..25: note = Synthetic
  source 1..25: mol_type = other DNA
agaagaatatgtgcagaattaccaa

SEQ ID NO: 1954 - DNA, 25 bp, synthetic construct
  misc_feature 1..25: note = Synthetic
  source 1..25: mol_type = other DNA
aagaagaatatgtgcagaattacca

SEQ ID NO: 1955 - DNA, 23 bp, synthetic construct
  misc_feature 1..23: note = Synthetic
  source 1..23: mol_type = other DNA
tgagaattgttcaattggatcca

SEQ ID NO: 1956 - DNA, 22 bp, synthetic construct
  misc_feature 1..22: note = Synthetic
  source 1..22: mol_type = other DNA
aacaggactgcatcatcggaac

SEQ ID NO: 1957 - DNA, 22 bp, synthetic construct
  misc_feature 1..22: note = Synthetic
  source 1..22: mol_type = other DNA
taacaggactgcatcatcggaa

SEQ ID NO: 1958 - DNA, 22 bp, synthetic construct
  misc_feature 1..22: note = Synthetic
  source 1..22: mol_type = other DNA
gaagaatatgtgcagaattacc

SEQ ID NO: 1959 - DNA, 23 bp, synthetic construct
  misc_feature 1..23: note = Synthetic
  source 1..23: mol_type = other DNA
tgtaacaggactgcatcatcgga

SEQ ID NO: 1960 - DNA, 23 bp, synthetic construct
  misc_feature 1..23: note = Synthetic
  source 1..23: mol_type = other DNA
agaagaatatgtgcagaattacc

SEQ ID NO: 1961 - DNA, 24 bp, synthetic construct
  misc_feature 1..24: note = Synthetic
  source 1..24: mol_type = other DNA
tgtaacaggactgcatcatcggaa

SEQ ID NO: 1962 - DNA, 24 bp, synthetic construct
  misc_feature 1..24: note = Synthetic
  source 1..24: mol_type = other DNA
gaagaagaatatgtgcagaattac

SEQ ID NO: 1963 - DNA, 25 bp, synthetic construct
  misc_feature 1..25: note = Synthetic
  source 1..25: mol_type = other DNA
gtacaaatgctgagaattgttcaat

SEQ ID NO: 1964 - DNA, 23 bp, synthetic construct
  misc_feature 1..23: note = Synthetic
  source 1..23: mol_type = other DNA
gctgttttcatccaggttgtgat

SEQ ID NO: 1965 - DNA, 22 bp, synthetic construct
  misc_feature 1..22: note = Synthetic
  source 1..22: mol_type = other DNA
gctgttttcatccaggttgtga

SEQ ID NO: 1966 - DNA, 21 bp, synthetic construct
  misc_feature 1..21: note = Synthetic
  source 1..21: mol_type = other DNA
gctgttttcatccaggttgtg

SEQ ID NO: 1967 - DNA, 21 bp, synthetic construct
  misc_feature 1..21: note = Synthetic
  source 1..21: mol_type = other DNA
gactgcatcatcggaaccttc

SEQ ID NO: 1968 - DNA, 23 bp, synthetic construct
  misc_feature 1..23: note = Synthetic
  source 1..23: mol_type = other DNA
aggactgcatcatcggaaccttc

SEQ ID NO: 1969 - DNA, 20 bp, synthetic construct
  misc_feature 1..20: note = Synthetic
  source 1..20: mol_type = other DNA
gactgcatcatcggaacctt

SEQ ID NO: 1970 - DNA, 22 bp, synthetic construct
  misc_feature 1..22: note = Synthetic
  source 1..22: mol_type = other DNA
aggactgcatcatcggaacctt

SEQ ID NO: 1971 - DNA, 23 bp, synthetic construct
  misc_feature 1..23: note = Synthetic
  source 1..23: mol_type = other DNA
cgtcttgaaccctcccaagctcc

SEQ ID NO: 1972 - DNA, 22 bp, synthetic construct
  misc_feature 1..22: note = Synthetic
  source 1..22: mol_type = other DNA
ggaaccttccagggatctcagg

SEQ ID NO: 1973 - DNA, 21 bp, synthetic construct
  misc_feature 1..21: note = Synthetic
  source 1..21: mol_type = other DNA
accaccccattattacagcca

SEQ ID NO: 1974 - DNA, 20 bp, synthetic construct
  misc_feature 1..20: note = Synthetic
  source 1..20: mol_type = other DNA
accaccccattattacagcc

SEQ ID NO: 1975 - DNA, 21 bp, synthetic construct
  misc_feature 1..21: note = Synthetic
  source 1..21: mol_type = other DNA
caccaccccattattacagcc

SEQ ID NO: 1976 - DNA, 22 bp, synthetic construct
  misc_feature 1..22: note = Synthetic
  source 1..22: mol_type = other DNA
accaccccattattacagccaa

SEQ ID NO: 1977 - DNA, 23 bp, synthetic construct
  misc_feature 1..23: note = Synthetic
  source 1..23: mol_type = other DNA
caccaccccattattacagccaa

SEQ ID NO: 1978 - DNA, 20 bp, synthetic construct
  misc_feature 1..20: note = Synthetic
  source 1..20: mol_type = other DNA
atgcctgacttacttgccat

SEQ ID NO: 1979 - DNA, 24 bp, synthetic construct
  misc_feature 1..24: note = Synthetic
  source 1..24: mol_type = other DNA
ttcaccaccccattattacagcca

SEQ ID NO: 1980 - DNA, 23 bp, synthetic construct
  misc_feature 1..23: note = Synthetic
  source 1..23: mol_type = other DNA
ttcaccaccccattattacagcc

SEQ ID NO: 1981 - DNA, 20 bp, synthetic construct
  misc_feature 1..20: note = Synthetic
  source 1..20: mol_type = other DNA
caccaccccattattacagc

SEQ ID NO: 1982 - DNA, 22 bp, synthetic construct
  misc_feature 1..22: note = Synthetic
  source 1..22: mol_type = other DNA
gtcttgaaccctcccaagctcc

SEQ ID NO: 1983 - DNA, 20 bp, synthetic construct
  misc_feature 1..20: note = Synthetic
  source 1..20: mol_type = other DNA
gtgcacctagtgaactccat

SEQ ID NO: 1984 - DNA, 21 bp, synthetic construct
  misc_feature 1..21: note = Synthetic
  source 1..21: mol_type = other DNA
atgcctgacttacttgccatt

SEQ ID NO: 1985 - DNA, 21 bp, synthetic construct
  misc_feature 1..21: note = Synthetic
  source 1..21: mol_type = other DNA
aatgcctgacttacttgccat

SEQ ID NO: 1986 - DNA, 25 bp, synthetic construct
  misc_feature 1..25: note = Synthetic
  source 1..25: mol_type = other DNA
ttcaccaccccattattacagccaa

SEQ ID NO: 1987 - DNA, 20 bp, synthetic construct
  misc_feature 1..20: note = Synthetic
  source 1..20: mol_type = other DNA
ccagtttcaccaccccatta

SEQ ID NO: 1988 - DNA, 24 bp, synthetic construct
  misc_feature 1..24: note = Synthetic
  source 1..24: mol_type = other DNA
cggaaatgcctgacttacttgcca

SEQ ID NO: 1989 - DNA, 22 bp, synthetic construct
  misc_feature 1..22: note = Synthetic
  source 1..22: mol_type = other DNA
ttcaccaccccattattacagc

SEQ ID NO: 1990 - DNA, 22 bp, synthetic construct
  misc_feature 1..22: note = Synthetic
  source 1..22: mol_type = other DNA
aatgcctgacttacttgccatt

SEQ ID NO: 1991 - DNA, 22 bp, synthetic construct
  misc_feature 1..22: note = Synthetic
  source 1..22: mol_type = other DNA
aaatgcctgacttacttgccat

SEQ ID NO: 1992 - DNA, 24 bp, synthetic construct
  misc_feature 1..24: note = Synthetic
  source 1..24: mol_type = other DNA
agcggaaatgcctgacttacttgc

SEQ ID NO: 1993 - DNA, 21 bp, synthetic construct
  misc_feature 1..21: note = Synthetic
  source 1..21: mol_type = other DNA
ccagtttcaccaccccattat

SEQ ID NO: 1994 - DNA, 20 bp, synthetic construct
  misc_feature 1..20: note = Synthetic
  source 1..20: mol_type = other DNA
tgcctgacttacttgccatt

SEQ ID NO: 1995 - DNA, 25 bp, synthetic construct
  misc_feature 1..25: note = Synthetic
  source 1..25: mol_type = other DNA
cggaaatgcctgacttacttgccat

SEQ ID NO: 1996 - DNA, 25 bp, synthetic construct
  misc_feature 1..25: note = Synthetic
  source 1..25: mol_type = other DNA
tctttgtaacaggactgcatcatcg

SEQ ID NO: 1997 - DNA, 23 bp, synthetic construct
  misc_feature 1..23: note = Synthetic
  source 1..23: mol_type = other DNA
aaatgcctgacttacttgccatt

SEQ ID NO: 1998 - DNA, 21 bp, synthetic construct
  misc_feature 1..21: note = Synthetic
  source 1..21: mol_type = other DNA
ggaaatgcctgacttacttgc

SEQ ID NO: 1999 - DNA, 25 bp, synthetic construct
  misc_feature 1..25: note = Synthetic
  source 1..25: mol_type = other DNA
aagcggaaatgcctgacttacttgc

SEQ ID NO: 2000 - DNA, 23 bp, synthetic construct
  misc_feature 1..23: note = Synthetic
  source 1..23: mol_type = other DNA
agcggaaatgcctgacttacttg

SEQ ID NO: 2001 - DNA, 22 bp, synthetic construct
  misc_feature 1..22: note = Synthetic
  source 1..22: mol_type = other DNA
ccagtttcaccaccccattatt

SEQ ID NO: 2002 - DNA, 21 bp, synthetic construct
  misc_feature 1..21: note = Synthetic
  source 1..21: mol_type = other DNA
gaaatgcctgacttacttgcc

SEQ ID NO: 2003 - DNA, 25 bp, synthetic construct
  misc_feature 1..25: note = Synthetic
  source 1..25: mol_type = other DNA
ctttgtaacaggactgcatcatcgg

SEQ ID NO: 2004 - DNA, 22 bp, synthetic construct
  misc_feature 1..22: note = Synthetic
  source 1..22: mol_type = other DNA
cggaaatgcctgacttacttgc

SEQ ID NO: 2005 - DNA, 22 bp, synthetic construct
  misc_feature 1..22: note = Synthetic
  source 1..22: mol_type = other DNA
gcggaaatgcctgacttacttg

SEQ ID NO: 2006 - DNA, 23 bp, synthetic construct
  misc_feature 1..23: note = Synthetic
  source 1..23: mol_type = other DNA
gaatatgtgcagaattaccaaac

SEQ ID NO: 2007 - DNA, 23 bp, synthetic construct
  misc_feature 1..23: note = Synthetic
  source 1..23: mol_type = other DNA
ccagtttcaccaccccattatta

SEQ ID NO: 2008 - DNA, 22 bp, synthetic construct
  misc_feature 1..22: note = Synthetic
  source 1..22: mol_type = other DNA
gaaatgcctgacttacttgcca

SEQ ID NO: 2009 - DNA, 22 bp, synthetic construct
  misc_feature 1..22: note = Synthetic
  source 1..22: mol_type = other DNA
ggaaatgcctgacttacttgcc

SEQ ID NO: 2010 - DNA, 20 bp, synthetic construct
  misc_feature 1..20: note = Synthetic
  source 1..20: mol_type = other DNA
taacaggactgcatcatcgg

SEQ ID NO: 2011 - DNA, 20 bp, synthetic construct
  misc_feature 1..20: note = Synthetic
  source 1..20: mol_type = other DNA
gtaacaggactgcatcatcg

SEQ ID NO: 2012 - DNA, 23 bp, synthetic construct
  misc_feature 1..23: note = Synthetic
  source 1..23: mol_type = other DNA
acaagcgatgaatgtgaatttgg

SEQ ID NO: 2013 - DNA, 24 bp, synthetic construct
  misc_feature 1..24: note = Synthetic
  source 1..24: mol_type = other DNA
agaatatgtgcagaattaccaaac

SEQ ID NO: 2014 - DNA, 20 bp, synthetic construct
  misc_feature 1..20: note = Synthetic
  source 1..20: mol_type = other DNA
tttcaccaccccattattac

SEQ ID NO: 2015 - DNA, 23 bp, synthetic construct
  misc_feature 1..23: note = Synthetic
  source 1..23: mol_type = other DNA
cagtttcaccaccccattattac

SEQ ID NO: 2016 - DNA, 23 bp, synthetic construct
  misc_feature 1..23: note = Synthetic
  source 1..23: mol_type = other DNA
cggaaatgcctgacttacttgcc

SEQ ID NO: 2017 - DNA, 22 bp, synthetic construct
  misc_feature 1..22: note = Synthetic
  source 1..22: mol_type = other DNA
tgtaacaggactgcatcatcgg

SEQ ID NO: 2018 - DNA, 22 bp, synthetic construct
  misc_feature 1..22: note = Synthetic
  source 1..22: mol_type = other DNA
agtttcaccaccccattattac

SEQ ID NO: 2019 - DNA, 25 bp, synthetic construct
  misc_feature 1..25: note = Synthetic
  source 1..25: mol_type = other DNA
acaagcgatgaatgtgaatttggag

SEQ ID NO: 2020-2029 - skipped (10 entries)

SEQ ID NO: 2030 - DNA, 11 bp, synthetic construct
  misc_feature 1..11: note = Synthetic
  source 1..11: mol_type = other DNA
tcctttgcagg

SEQ ID NO: 2031-2090 - skipped (60 entries)

SEQ ID NO: 2091 - DNA, 11 bp, synthetic construct
  misc_feature 1..11: note = Synthetic
  source 1..11: mol_type = other DNA
cctgcaaagga

SEQ ID NO: 2092-2141 - skipped (50 entries)

SEQ ID NO: 2142 - DNA, 155 bp, Homo sapiens
  source 1..155: mol_type = genomic DNA
cagttggccaaagacctccgccagtggcagacaaatgtagatgtggcaaatgacttggccctgaaacttctccgggattattctgcagatgataccagaaaagtccacatgataacagagaatatcaatgcctcttggagaagcattcataaaag

SEQ ID NO: 2143 - DNA, 62 bp, Homo sapiens
  source 1..62: mol_type = genomic DNA
gattattctgcagatgataccagaaaagtccacatgataacagagaatatcaatgcctcttg

SEQ ID NO: 2144 - DNA, 60 bp, Homo sapiens
  source 1..60: mol_type = genomic DNA
caatgcctcttggagaagcattcataaaaggtatgaattacattatttctaaaactactg

SEQ ID NO: 2145 - DNA, 30127 bp, Homo sapiens
  source 1..30127: mol_type = genomic DNA
gtatgaattacattatttctaaaactactgttggctgtaataatggggtggtgaaactggatggaccatgaggatttgtttttccaatccagctaaactggagcttgggagggttcaagacgataaataccaactaaactcacggacttggctcagacttctattttaaaaacgaggaacataagatctcatttgcccgctgtcacaaaagtagtgacataaccaagagattaaacaaaaagcaaaatactgatttatagctagaagagccatttatcagtctactttgataactctatccaaaggaatatctttctatctcatcatggcgcacactgccttacctgttatctgataaataagtcactttgggattcatgatagagttatagctgtacatggtctcatcctagtatctcactccacacacccaatgggaaaatttgtggagggcaatatgactcgtcacttcatttcccattatatatgaatggaaattaacagcgcttatagacagtatctcctcaaactaagccttgtatccttattatacctctcttgatctctagtgcttttttcactagcatttattccaatcataaataaaaatataaattatgtaactaattgttaaatatttgtcctttaaattaatctaaatgccatgagggcagagattttgtctttctcatttgatacatccccaggtcctgaaccacgtgatataatagggagctagtaaatgttttttgaatgatgactccctttgcagaatgtacaattaccttgtgcaagctgaaaaaatagcacctgtacaatatgaggaagaccacggtgaaaaataattgagttccaaaatatgacatcaattactgaaaaaataagctcggtgatttttaacaagaagtaaaagtcaccactggggccaaaacagattttgaactaagagtaggaagtcttaggagaaatgagataatgatatatggaaattaagcggccaactaaattttgaaactgagctagacattagagagtaaaaactcctgtgaagctgaatttaagctggtcaccctggggaatagagcaactctaatcctgaattccagacagtaggtgtatagatggaaaagaccatggaaaagaagattcaacctaaagttgggaagttttaattggagccctatgaaaaagaccctggtggagaaagggcaaacttgaatatggagctgatatttggaaaaattctcatagtaactactttttctcaatggcaaggcttggactttcttctcaaaatacagatcttatatgtgttcaattaaacagggacagattaggttcaggaagaattattcacatggaatcaattggtatcagagagtcaaccattagatcttagtgggaaatatctgcttctcaaagagaagtcttttggggaaagcaaattaaagtcagagattaatttgatgagtttaggtaatataaactaaggggccaagaaaaaagcttgctcatggtatgaaactagagcttgaggacactgatctagtctatctatactactctttctgacagacccctctcttcattctcatgctccttgatggcccaagccactctctcagttttttaaaaaattgttttatcaaggtctctggattcttcatgggaatgacttccagtttatattttttggcttggttccaaaaagctatcagctaaggaatgcatatacttacttcccctatgggtaaagtaaatgagaattttagaagccaactcacatttttagcctgtacagaatctgcaattcaccaagctacttctgactcatgtctataaagttcttccctgttcttttctcacttcacatgtactctttgcaagaattcatccacttgtgtagtttcagtctgttgatgactacccatctataattccagctgagaatgatcttttgagttttagacatgtagatcctgctgctttctttcgatgttaatgtcccacaggaacttcacattgaagaggtccaaagctaaactcatctttgccttcttccaatctctttctccaaatgcaacctacttctgttgtccttgtcttagtccttttcgtgcttccgtaacaaaataccacagactgggtaatttataatgaacagggatttgttggctcatagttctggaggctgcgaagtccaagatcaaggggctggaatctggtaagggccttcttgttgtgtcatgattccatgatggaaggtggaagaccaaaagagagaaaaaatggggccaaacttgtccttatatgaaactcactcccacaataatgatgctaatccgttcatgaaggcagagccttcatgtcctaatcacctcttcaaggtcacatttactactgttgcaatggcaattaaattttaccataagtttgggaagggaaaaacattaaaccatagcattctgcccccttttccccaaaattcttgttcttctcaaagacaaaatacattcatttcatccccaaagccccaaaaatcttatttcagcataaactcaaaagtgcaatctaatataaattagatatgggtgagactcaaggcacaattcatcgtgaggcaaattcccttccatctctgagcctgcaaaatcgaatcaagttcatcccctcaccccctacccttcccagcatcaggtaaccaccaatcacagaaagttttactgatagtcctgctctagatcatctttgtctatgttcactttagctatttatcctagtgttccattattggaatactaagcatgtgggaattatttatattctactgttcaaggtcctcaccaaggtctgattgcaaaaattcaaaaaattgcaaccttaggcataaatgggttaagcagtttagggtacatttataataattatttactgtgctacttcaaaaatcttattgcctctatttataaataaaaagtgttgtctctacacagtggcttgttgtaatgcatttacttgtttctgcctgattttttctatttatacattttcttttttatttttatttttattttttcacttttaagttcaggggtacatgtgcaggtttgttacataggtaaacttgtgtcatgggggtctgttgtacagattatttcatcacctaggtattaatcctggtacccgttagttgactttcctgatcctctcgctcctcccaccctccacactctaatagtccctagcatgtgttgttcccctctacgtgtccatgtgttctcatcatttagctcccacttataaatgagaacatggggtatttggttttttgttcctgtattagtttgataaggacaatggcctccagatccatctatgtccctgcaaaggacatgatctcattctttttttatggctacgtagtattccatggtatttgtgttggtctcaaaaactacaactatgacaggatggcattttcacttttgttgttatattaaactcatcttaaaaaggaaagattaataatgtcaatatttgggttatggagaaaaagtatctcatatctttgaaaaagttctgtaactatagctttttaggtaggagggattctgtggaaagttttctgattacatcatttctcacagttcaggttagacaccattttactatgaaacactaatgcattgcctgcactgagactttcagtcacatggagaaacctaggcaaaatttttgtacacttggaagaatatttaaattagtaataaaatctttagttttaaactgttgaatgttaaataagatataaaatgtacttgaaagaaatttgctttgatatcagacactgccatgttgcagtttcaagacataataaaaaagtaaactaatgtttatattttgctgtttaagtttattaatacatcagatgagtcttcaaattctacagtggcttttgatatgatcatttttacttgccattttatatagaataaatataaataggcatttatgcttaaaaggaactaatctatctatggaaaaaagagaaggctgcttctcaactaaattgtacagtttagaaacccagatctgaacatagattattgttgtgacctatgtaggaaaatatgttgttttccttatcgtagtccttacagagtccatgataacatataaagccagaaatgtgagcctctgcaagttcatttctttgtcttcaatctctgtgaatagatatgagtttgtgaataagataatattagatgtgatattacaaattattgtgagaagcctctaaggattagatttcaaggactgccatctggctgatgactttatgatgacactgtcatgagatttcatttccttatttctgttccaggatcactctttaaacaagaaataagcattaactctgaattgtctgcttgtagctgtatgagggcttccacaactgccaactagccaggtacaaactcatcaagcagaggagatggtccttgcatcagagggttaaacatgcctagaagttccttagctaagctcccagatactaaaaaatccctctaggttctaagaaagattcagcatgtacatgtgtgtacatgtatgtgtgtacatatatacatatacgtgtatatgcatatgcatgcatatacatacaaacacattttcttccataacatctcagtattctctgttctttataatactgttttgtattttaatgatcaaaattaatagttgatcatctgaaaacattttgacctgttttctccgtctttgacaaccttgaaggcacttgtaagtcactctttgcttctctattcctaggtcctttctcatcttcattgcaacaagaaaagagaaaacaattgagccctattttgtgtgtagcaaggagctactctagttaaacactagatctcttttacattctccaacatgttgttttagtaattattctactttcctttttttgggatattcaatttcttctttctttttgctcctcccctttagcaggccaacatactcaagtctccctcatcctaagagaacttttttagtatatcattttttttctatccagctgtacttgcttctgcttactatatcatttttaagcagtagttggcattactgtttcctgttctttagctactagttgtactttgacccactccagtctcacttccccagcaccaccactttatgaaaacaaggacttactaagatcatcagtgactttgtaatagctaattagtgtattttaattcgtccatcttcttgactatattttaacattgatcctgttggtcaactctgctaatcaaaactttatcctccttggttcccagaacaatattatcttgaatatctcatttctctaatcatataataattgtgaggtgcttggcacaatgcctagtgcgtagtaagaactcagtaaaatatcatctgccatcgacaccataaaaattaatttacttactcaacaaatacttttgtatgaagtttgtgctaggtaggcccagtaattggtacttggtatagagcaatgaaaagccctaccctcataaagcttatattcttggaagcagaagttggaagacagacattgacaaataaaaattaaatacatgatgtgtcagatggtcatacacacagtgtggaagaacaaagaggaaaacaagtggagagagagagggaggtggaagaggagtgctgccatgaaaatgtggtaatcaaaaaaggtcttactgaaaaggtggcatttaagcaaattctaaaagacctgaggatgtgggccatatgtataattgggggggaaaaagtagtccaggagagtcctaataagttaaaatgccccaaagcaggaatattcttggcatgttgaaggaaccttaaaagggagatcagttaggcagaaaaggatcaagcgagcaggaaggtagttgacaataaatttagaggggtaactggcatctgattatattggccttttaggcctgtggactttagcttttaatctgaatgagatgggagttattggagggttttgaatggaggagtgacatgttttgtcttatctggctcctctgttacaatagactaaacagaagtagtgagaccattaggaaactgttgtcataattcagtcaagagatgactgtggctgggatcagaatgggagaggtgaatgtggtgaggagtggttggattctactatattttgggtacagagcacaacagattttataatggaataaatttaggtgtgagagaaagagtcaagaagactcaagaatttttagcctgagcaacggaaagatggggtcatcatttactgagatggggaaggctccaggagtaacatattttgggaggaagatgtggatatgttacatttgaaatgcctattatacatctaggagatgtgtggagtagatagctggatatatgaatcttaagttatggggagtagctcaagatacaaagttgggagttgtaacaatgatcagtgcaagttctctgtcttcaatgcaattttaaatgttgatgttccattcttaattgtctctcttctttctctctgcacattttgagtagctttgtctgttggcttcagttaacattaagactcctcagtgtcaacttccatcttacactcttctcctgatctccagaactgtactttctgccacctaacctacattaccacctggatatgctacaggctgcaaaatgtgtcaagtagaatgcattatcttgcccctaaaagaaagttaaattttctgtgttttcagtgtagtgtaattgtctaacttaattgtctctaaaactggaaacctaagaattaccttctacctttctcttgatctctctttcccaatctactgacacatgtattaaactggcttccaaattctgtgaattctacttcaaaaattgctctagaaacaattccctctctttatccctattgtcacctcatcctaaagcctcttcatcctttgtagatttctgggagattgtaaccaacttttctctattctgccagttatcaagtctttacgctcatttgacattcacaacagccttggatctgtcttccttgaaatgaatcttcttgcttccctttgattccagtgctttttttttaccctcctgagacttgatgcatgatatttacatgtatgacatgtttccaaaagcattctcaaatttttctgaaagtaaaaacaaatgaaaaagtaaaacattttcctgggaagaaaagcaaatagtgttatacatttttgcttgttcatttgtttgtttatttaggagagggacaagcattagaacttcataagagtcttatatgctgtatctacaaataccgtcccttggcaatataattttagagttccttttctggaactacttaaggactgttttatgatcctcagcagactgttatattattttatagccataccttttatttgctgagtaattgtactcaataattgtttgtaattgaatgaaacaattcatcagatgttgggcactgaatggctttggattatttccaaaaatttaaaggataaagatttgctgccttcaaagctatgtacaaaaatatgatagaatgctagcgggatatttgtttaaaatacaacctttattacattggggcctgctcataatatatatgtggcacattttatttaaaatattaaagttcctggtgggacatgtccccataatcccagcactttgggaggccgaggtgggggtgggaggatcactagaggccaagagtttgagaccagcctgggcaacatagtgagataccatttctacaaaacataaaaaaaaaaaaaaaaaagccaagtttgtagtcccagctacttgggaagctgaggcaagaggatttcttgaacctaggagttcagttcaaggctgcagtgagctatgatcatgccagtgtactccagcctgggtgacgtagtgagactccatctcttaaaattaaattaaatttaaagctacaaatgaccccaaagccaccagttcaaccctctcaattttgaataccctattttaaattcctcttatgcgaaatgtaccttgtagtccattttaaggactgagaggatttggtatgttaaaaaattcaatccattatcaactcctttaggtacacttagcagtatgaaaatgtgtctttcggctcttcaggagagagtcatatgtatagttacaagacaatcccatttttatattgctgagacccaaatcttcccaactgattatgaagcataagaactcttcggaggtttaagtgagctgagattgtgccactgcactacagcctgggcgacagagcaagactttgtctcaaaaaaaaaaaaaaattctctgcattctacagtagggtaatataacatctatgatgtgaaatcttggggctccgggccagagagtgtcatgatccatatggatctaaaaggttcatagtggtaacagcctgcttcattttatgtcatctcctttcaagtaattagaatgtttctagcttgcagggattgcacacaaagggagacatttggaaccatgtcattggtgatttactggtgtggaaaattacctggtgatgtagccaagtagccattttcattctaacccagtcctacagtcctgaactgggctgaaccaacgcaccaaaatatatgcttagaaatgctcctatgtatcagttttcccaggaaaaacaatagtattatcgaaaacttaccattgtttcctaataaaaaattataggataccaacagactgttttttgttcataaatttaatattacagtatcaaatattaaagcaaatgggagaaagtttttcttatttggtttaattgaaccattaatgttagctacaatacccatcatgttacttttcaattatatttatattttcattttatttctatctgtatcattctcagaaagacttctttaaaacattcaataaaaatagaatttaggtagatttatttttagaaagttgagtttttttaataaatgaatataatcatcacttgacttaatttttttctgcacaattctagaaatcttatagttttgggatcctttggctttattcagtatgtaacagggatctgtttcctttctctaaatcattaattcaaatgatttcttatattaaaaatgtttggacatataggtattaatgagttttatgaaatctaatctttccaatttccccctaaaaagggatgtcatttaatcagttctaggttgtgatcaatagcagatttttttttttttttttttttttttttttttttttttttttttttttgcagctccctttcaccccgtagggaaacctgatatcatccttgactaattgcagcaaagagcctggctcaggtcctttgtcttataccgagtgtttatagattcttgagcccagcagaatctgaactcctggctactgctacctacttcccagcccaggccccaaaagccctatgtctgcagccccgtgcaccactgtgtgtttttgtggcatttctgaaacacagagctacttaacttgtttctaagcccagattgtgcctttttgattttctattttggtattttatctaccatttttctgtgtttggatgtttcttctatattttgaaataacttctttcctttagtacaagtgattcttattgtagaaactatcaaaaatttacaaataaagaatcattctcaacattcttagcaattccttctatcatatttttgcaaatatatttttgcctatttttattttacttactccctgtttattaacagttaaaagcattttcagatagttttattttttcatttaaaaaaatcttaccacatttttattaggaaggaaatggacaggtgtttatcttttcaataaaaaacatgggggaaataatttcttgaagtacatagtgacattcttccagccaatgttttatgctgtggtcattccgtctgtcatcagtattcatagaaagagatgaaaattatttaaattaactaggaaatcaattccccattcaaagcagtagttgtgtgtttcaaatatcttctaatagtcagtttcacacttagctttatcaaattcctaattatgatactcattacatcactctgtgtccagtcagtgtgtttatgccacagagcaattaaagcaaatcaggtgaaccaaattcaatcacctttgtagataataacctacgttgcttaaacttatggccgctcatacaattactgatggattgcctttttcttttatattgccagtattttaaatgtcctagtgaagttggggtagctgttgaacttcaactttatcacaacctcttttttaaaatgtgtaaacgaaaaaaccctccatgaaatgaccaaatacagttttcatgctgggacaaattagatgaataataatcataaattcataatgattatttatgattttatgtttttatagtgagatatgttttgttgaaatgtgttatataagtgatacttaagtttcctattaaaatagaaatgctaaaatggcattgttctctttagctgtgagtctagcttttgacctctgcttaaacggaactgttgttccatcccaaatctgcaactctgaggcctatgctcccttcactgctgtctaatggatacctatcaatttggaaggaggtttcaggcagctattcccggtaatctaatctcagctctgtccttttcaatattttcatcagtggcttggatgaagacatagataacattcttatcaaatcaatgccacaaagcagggagaaatagcaaatatagcagacaagagtatcaggagccaaaaagttttcaacaagttggactggtaggctgaatactgaaagatgtaatgtaaatgcaaggtgctacatgtgggttcaaaagaaacatgaaacaaaaaacccatctaacttagactgggctccctggaaatagactaagatagagagttgtgtgcataaggtttgttgaggagtgttcccatgagatacatgtgtaaggttgtaagataggcaagattgcacagacgaagaagtgcagtgaagcctgcagtgcgttgcggcctcatcagattttcaggggagttctggaaattgcatggccctttagagacacgctgaattgaagcaagggatctggacctttgaacccaatactagagagttaatggtcctgggtcaccccatgggaaagagcagactggagtaagattgttacctacagctgaaggcaatttccagggagggaggcagctgtgagctgttagtagtcaatattccaaccagctagggcatgaggtcttggcagagcaacagtgtacccaagaccgcagtgttacccaaagtatggtcctctgactggcagcattggtatcacctatgagctcactagaaatttaaatttgtaggtcctaccccatccaactaaatcagaatctctggggatgggacttggggaacttttaacaagctttcaggcctccaagttatttctatgcatattaaaatttgagaaccactgcctacaccaaccaaaaacattccaaatatggagataacatagagtttttagcaacaataatctccttctgtttcacttctctctttacacacacacacacacacacacacacacaacacacaacacacaatgtgatagaacagtgggaaaggaaagccaaaggggatcttaggccgaataaatttaagcatataacctagtcctaagaacgtatatttcagcttaatagagagaggaatattgttataaagctgtccaaagatggaacaggctgccttgtaaagttgtagaagtattcaggaacaggttggtgataccttggtggttgtatggtataacatcctgatcttcacatactcatcatctagagtgggagttttctttttccaaatggggttttggcagaactagttccactgtatcttaataagtaataactcaagaaagggttctatggatgaaaaaatgattaggtaatatcaagttaaatcaaagcgaacagacttctttcccataggagtaatcagacccttattacagtgcatgcttggtgaatcaacaaagtatgtgtatttatgaaagtatggggggaagggataatctatacagtatgcatcccttctaaaagtttgaccatgaaaacaatttctcaagaatcttatacaacactacagtatctggtccaatactatgcatagaacatgcactcagtaagtgtttgtaagatagatagcatagcatataggccaggccactgaagggaaatcatctcaccgtgagttacctgaatagtattctctagtgccattagctcaattcttcacgtaggcataagcctatacatttgccatgctaaccaagggaatttgtgttacgtgaattttgactctattcagacatttttttctatgactcctccaaggctgttattcttacctcatattctggtagaagtttaaggacttttttctgggaatattgattaattagctagctagctagagacagagagaggatagagattgattctctggcagagcctatttgaatcatattgaatctttttttttcctgagacttcccacaaggaggatggaggagaaattttttagaaatccaccgaagtaatcagggatatcttcagtaaaagaagctatacttaataaagtctctattttagcagatggcaatcaacaatagaggcaatagacaatagagtctattaaaattgctgggatctgctaataacgtttttcttttccctgaaacaaatgccattaaccctccttgacactctgtcttcatcaacattctaatagaatggaagtaactcataattttgaggatttttttcccacacaaaacctataaaccacaccacgctagtgattacttttagcctagttgctaggttgctgctggtaacagtaaaacttatcctgacaggtaggcaattccagaagcccagccaagcacttggtgtgtgtgagtaaacccccatacacttctcatgtagagtaaccctggccaacccataactcttagcaactattcctggtggacggacctggtctactctaagaagaggccaaggttctttaatagtgcagttgcaagaaccagaattgaaagtcaaagttctagcaagattttgcagactccttggcaaaccagtggcttgggactcattcttgacttcaagcccttaattgataatggtaggacagcttgcttgcgctgggttctgctccctgggatatgcactgtttgccaaatgagtagcaggtggacagacatctttacaatttgctgtcccatattctaaatgaacgtgacattctataggtctgagttaacctatgaagtcaccaatttcaatatcaaaatatttatgacagagaaaaggatactgaggcacagagagtctgtgactttcctaagctcaaaacaccagtttgtgttaattctgacacagaaattcttgtatttgctatcagtctcctttttctgtgtgtgtgtgtgtttttacattgcagcatcacctatatgatgttaggttctgtaactttttgagaattttctcacatacagtgatgtgttactttttgatatttcaaatagttctagtaagtcttttctacttttattagcgtattaacatactggctctaagagggcatctcaccacatctttgccattcttcctggaaaggcaagtttctctccatcttcttttttgtattccaaagttttgccaaagtttgcttttgaaaatgggttacctggcagagctttattattctaactttgaaagtacaagtcagaatcagacagtggcagttatatatgcactactgtgattactatataatgaaagtatctatggtgaaaatactgatactgacatatatttgccattttctaattaagtgcttcagtaaaaattaagcactcactctttgccagatactgcaatagatattgagcacattgaacaaaattctccatatacatatatatgagtccacattctatgaaagtataatgtttttctgagaaaaggcataatattctattaatatcagcttttgcttcttccaccatatattgaaagaattctgaatactgttataatttaatgggagaatctagagaattctgtatttgctttcactgcattgatgaactaagatttttaaaaaatgtattcttcatagaactacttttccatatttacctaatattattcttatatcatttgagcacatatttcactaacaaaacaaatgtgcaatgttattagttctaacatcaaaattacactgatactttaatttttatcctattatttttcatgcagattaaaataattatagctacatcacatgttgcaagttttaagagctactttaaaaatatatgcttcaggaaagacatgattagatggggaaatggatgatgttcatattttcaaatgaaaagttttaaaaaagtgcctatcacaaacactaaatttttacataaattatcaactactaatatatctacaagaaataccatttttccctacaaaaactcttaacaataattgttaaacttagtcctggaacctgctaatataatcggacaaatgttgtcaataagaaggtgaaaaagaaagcatatatagtttatcaaactataaaatatagtttatcaaaaccaatttttcctattgacatttattcaggaaggaaaatggatgagtgaaatgaacaatggtctctaagagaggtgggagatagcaataaattcagaccacgtttcctgtcattacagcagggaagtaaaagagctacagtcaactctcgaaagtacttgggggaactaatgattccctgtagacctgtgatgtttttgaaatttaattcaacaatttgatatacaccgcaaagcgaacagatagtcagatcaaaatcggaagaacgattgtctgaatggcatccatttttcctagatgtgctgtcccatcctgtgtcaattaaactttcaggtgatcttcaaacatatttccaagtaaaaggtattgcagttatcctataaactggcctcttccccagcactgcttttgctgtggtcaactttatttctttgggctcacaaaactgatagagcaaaataaggaaaacggaacattggattaaaataaattaattcccattctgtgactcactaaaaaaaaaatgataactatgcttctgtgagcattaataaggaaatgaataaggaaatgaccaaattgttcagtggacaacttgtatgggatttttaagtattgtgtcatcatcaatgttgtcaattagcatatactttgaaatcaactaaagcaaatcagttgactaatcattaagggtctttttaaatgacaacatctaaacagcaaatgttttattttggaaaatcatgacagcacaagaatgagccagatgttttacaacatgatatccataatttaaagtatgtagtagtcactcaaaggatttctatttcagtttccttatgatttggctaagctagaatttggaaaaacactttaaggtaatgtgagaaacagcaaaattcaacatgtggattttttcactaaagcttatttctgattattttttacaaactttactaggtatatgttaacttcatgacacttatagcagtggaccgtagttttaataaaatgtgaatgtatactcttttctcaataatattaaagaatgttgactttcgtgaggatatttttatttttctcaacattaagaactgtcaaagatttaattctacaacagaagacgtgaattttgttttctaaaggagaacagaatctatagaagaagtgttgctcatagtactcagattgttgaccaatcttaaaggagaaaccgtcaattaatttaccgagaagtaataacattatctttttcttcaattatgcacatccacaaagatttggggcaaaatccacttaaatgatattatacataatagatgagtattcatatgttgtaagagtcctggcttctttcctgcaaaatgattaaaacttggatcagaaaccaattaaaaatccattctaattcccaaatgtatgtaactgtactataagaaaaataaatatttcttcttgagggatatccattagttaaggatattcataacatggtgtcttgtaggaaatgttaatctttgggtgaatagggatgtttgggaataacaagactcaaagagatgttgcacttactcacttttctctgagttgttatttctgtcatttccccagtgcgcctgtcctcaactttgcctctctccttattcctttttttttttttttttttttgagacggagtctcgctctcttgcccaggctgtagtgcagtggtgcgatcttggctcactgcaacctctccctcctgggttcaagcaattctctgtctcagcctcccgagtggctgggattacaggcacccaccaccacgccctgctaattttttttgtatttttagtagagacagggtttcaccatcttggccaggctggtcttgaactcctgacctcgtgatccacccaccttggcctcccaaagtgctgggattacaggcgtgagccaccatggccgatccctccttatttctttttatctctacctctgcctcaatggtatttctctattactgttagcatttgctttctgtgagctcttgcacactgtcagcttatatacatgttcctgttcacatgttttcctgtccccagtggttacaacatgtcttctatctcagcccactctagaattgtcttacttttccaggtctcctgctcctcagtatttttcccacttttctagattcatgttttcccatctgcatatttctcttccatgtctgcactgtcatccgcttagaagacagcgcataaggacactgttatctgagcaaatcttcagcacagccaccatgaagcatggttaccttgtcactttccatttttcccatagtgtgtgcaaactgccctgatctgcatagaaaggtatcataattgaggaaacaaaatgcacaaaaatgtccttggttattccacccctcagaaatataggagagaagtaatttacagaattacacagaataacgctatgtcacatggacatggagttatcgggttagcatataattggaaaatatttcctaggaccttgacatttactcactttttgttttcaaattacatgtccctatctattagttgcaaattattttaatgcaccgtttaccaaagaaaggctgtttcttctgaaagctttcatttgacaagtaacttgtaaaaatattcacattgtgtatctgttttccccttctagtccaaactctagttatcttaaactttgcgcagttataaaaaatcataacaaaaaaagcttcctcgttgtcattcttgtcaaaacaggtttaccagacttaggtaaacttaaaatagttagtgtaaaagttaaaaagctgatttgctccttccagcgtgtttgttgcctttttgccacagcaaaattgtaaatgtaaacgtattccctaggagatgagctgggctgcaattttcagctaattgggagaagcagccctgagttgagcactgtcaggctgatttgagtcttaagatatgatgatgattattgtgtcaaatgtaatcaagaacgtgggctctgaactgactcaagggctggctgtttttaattcaggttcgtatatgaagtagacctccggttcaccgatagtcacagctggttgtagaagagagcaatttttaaaatgctatttcattctctatggagctctagggatcagagattggatgcacagggaggggacacatcctcattctctcctgaaaaattctattaattttcagtataataaactttctcttgagattccccagtggctctgtatcggtggttttcaaacttctcagacccaatgccacccctcttttcttttttaaataacaaatactttgtaataccttctttacgattataagccaaaatatgtagacaacataccctacttatacaggcaatagtttaaatgatgccgtaactctattttaaagagaaataagagtcatttataataaaataatatgtgttgtagtatgcagttattcaggcaggatcacactggaacacaagtgaagtttttagatcacgagactatcaatgcagtataaacaaatgcagaatgacaccattgtgttgtatggagactcaaataccatgaggggcattggtcatccatagcgtaattttccaaaatgctgaacaactcttggcaaaattcctaacaccatgaaataaattttttcttggatcgttatggcagttagttgcatggctgaaaaattcaatgtcttaaaatcatgaggaaaatatcttatgtttacgtgtaaaattgagttacgttccaggtttaggtgtttataaacagggtttccacatacatgcatgtccagtgggatattccaaagtgctgtcagacttgggagagttctttgttgtataagaagtctaccatcttcattccctctccacagaatgctattatagtaacactcttcaatcactgtgatagtcaaatgtcctccctcaatttctaggatgcctcttttttttgtggtctgtataatttggttaaatatctttccagacaaatactgatttgtgaattaatgaaatagcagtattttcggagcacctaacctatttctgagtgatacagttgccatttttacaagactaaatgaaattaccatttcagacctgccagattgtctagcccagtcttttacaattctgtgattatcactgcaattataatctattttcaccacttgaatggcatgatctctataaaagggtggtgataacactcatctattctccttcccctcacatagctatatcaatcgccccctaaccagttgttgataaatgcagttgaattttatgtaaaaattataagagatattattgtagctgtccaagacatttaaaatgctaaatgcaacttacgtggaggctataagagaaatatgaacccatttattgaagagattagctaatttagtaaaacaacacagatatacctgcatacagggataaatccctattgtctaaattattgagataaaataatgttttacaatgaaaaacttttagacaagtaggtaagtaaaatgcagcagtctatttgcatttcatctgggcatttgacaaagtctttcgttatactcttgtgaataagttggagaaatactggctagatgcaagataaattggatggcttagaagccacttcatgattttacgcaaaggatgtcgattaatagaccagtgtcaggtggtgatggaagatctctggtgctatgtcacaagcttctgttctcaaccctgacacactggatgtttttgacagaacatgagtagaactacagagaggaggcccatcaaacttatgggtgataaaaagcagggagggcaggagtattttgggtgacagaagccaaatgggtgtctggacaggatgcgttttaaggcacttttggtacttgatgtctgaagaccaggatcaaacttataggcaatctgaacatttgccaaaataacaggttaattttgacagaagttattatttgtatgctgtctatttctttaatacacctagaaagtattgaaataacattttttgcagacactcattttgaaaattcagaaaaaaaattgttaactttcgtggaagagtaacagaaactcagtcattgacagctaaatacaatgtgttgcccagtaaaatagtccaccccttcactttcatggctaatataaaatttgatgaaagatacaaattccaaagattgaatatctgtacatttgcaaagcaaaacacaattttgggcacagaattgctcattctcatttttaaacatcttggttataactgaacaatagttttttataacaaagataatattttcaaattattatgaggttcaactgaaataatttatgtgaaagcaatgtctaaactctaaaattctatataaatataaattattattcaataaattcacatcaagaaaattttaagttttttaagaacaagagcctatggccttgtttttagaagctgtataccttatcggtagtaggtttattgactttaattaaatttattgagtatctattaaattgccaggaactgtggtgtgaatctttgccctcaaataatttacagtaagttgtggttgatgaatggtgatgacgatgatgaatatccagactatagtaagtggtatattcataagtcagaggattcttaaaaccagatgcaccctcagattcattcctttcatgttgtacttctaattgaaaaaaataaatcctaaattatgactgttctttataaattttaattgatcttataaaaggccatcaatacatttcaaagtatctaggtcttttaaatgcaatttttcaccctggtaattaaaagtacgaaagcaagaaactttaaatctttattttgataagttttaattagctcaagctacttgtaatcccacatcttgtcttgtaaatcatatctgagccattaaaataggtttacaattagaagggcaattcttttagaatctacttaaactaagtcacttcgacaaattaattcatcgttcagttggttttattaaaatgtatttatttcactgtaaaatgtctagtaaagcaatgtatgaagtattttattttcatgttagaaattttatgtaaaagatatcccaaaatacatagacattcagatactctctgtatcattaaccaacatttactaacttatcatttagagaaggccaaaattgtatgtactataactttgtataatttcataagaattaaaatattcgattaatgcctgtaatgccttctttctaaatcaaatcctcaagcttacctcgagttcaaagttcagtatttattgtaacacatctcatagatgacggatgaagatggtaagcaaaggaataataatttcttttctcttttcacacatatatacacacataccccataatcctaattcatataataataacagaaaacaaagggcttttgagaatagtgacatattaatatccattatatttacttcacagggagactggcaagtctaccttgagaggtaatgtcttatagtacagtggactagattgtttcaagatttgtcatttattttggcaactcacccagcttccctgaaagttaagttcctcatctataaactgttcatgataattacaacctgcctcattagcctcatcaagctatttaaaatatgaaaggaggtgctatctgtggatcctgtcaaaggagcttgaaaactgcagaacattattttagtgtaaaatactataacaatacatgttgaatataaaatggctttttcttaacttttattttaagttcaggagcacgtgtgcaggtttgttatataggtaaactcatgtcatgggggtttgttgtaccgattattttgttacccaggtattaagcgtagtacacattagatatttttcttgatcctctccctcctcccaccctccccactccagtaggcttccacgtctgttgttcctctctgtgtccatgtgttctcatcatttagctcccactaataagtgagaacatgcagtatttggttttctgttcctgcattagtttgctaaggacaatggcctgcagctccatccatgatctctgaagaatctccacactggttttcacaatgactgaaataacatacactataaccaacagtttataagcaatgctttttctccagaacctgttatttttgactatttagtgatagccattctgactggtatgtgatggtatctccttgtggttttgatttgcatttctccaatgatcagtgatgttgagctttttttcatatgcttgttggtcgcatgtatgttttcttttaaaaagtgtctgttcatgtgctttgctaaaagggccctttcaaatgtgtattattaaccacaagagagtactgagtaagagactaggtaataaaagtcacaaatatttcgatatcataattcagaatttagatcagcggttatgaaattgttcgtatttccaaattccactgacaggactctactataagtttatttcatctgttgatatgtttttagccacttctttcttttaaagtgaatctgttgtgtgtttgccatttgatattagaaaactgaacctgcctgctttgctgtcttctgaatattatgtatcaacaactaacaagctacagttagttgttttgttctgtttttctctaagttattgtggatgaggatatatataactgcacagtcttatcaggtttgtaagagatgatcttaggctcatcttttaaattggtttttatactattttaaacaaatccttttaggagagaagaaaagctgcttagtctatcaacattaggaaatatatctttaaagagtttatcactgcaagtaaccaaagccaacttaaaaattcgcattatacaaatcattgagaatttatttagaacagaaatgtgtccaactataggtcaacaccaattttaagtgtgtaattatctgggaagtagtgttaactgcatttttttctaaagatcccttacagttgtataaatgcccaaaaggatattttgagtctctgtatattaaccaaaccaaatgtaattcattactcccaacattatatttcaacctctccaaatagtaccttttcgtattgtatcagcagaaaaatataaaatgcagatcttaaagagtatcaatctctttaaaaattcaagaaagaaaaaaatatgtgtgtatagagacgtgtatttcatctgctcataacactgtgtacatttctttatcaactaatttttttcagtgatttatgagttgaaatacaaatcaaatgaaacgggtaatgcaaagtaaagtagaaaacacattttctactgctgtctcctaatgcaggtcttttcaggaaagtactaatggttttagggaaagtgtataattatggttgtttccctaatgataaattcgcaaatctctattttaaaaacattcataaggttaaaaaaatgagagatgaaatgtgtctttcaaaattccttacgtgattgataatgcctatactctcttactatctaaagtctaggtgatatgtatattttttttaaaaaataaaatgtctgtatcagtgaaggaagtttacacagatagcttcaaagctgtggtttatctttggaggattaatctatttctcatgccagtgtgttgctactgcacatgttaaaaagtcatcctgtggtgtctggggtgacaaaagatgggaatgagttttctgagaactaatcagcaatactttgggaacatttaggtcatggtttccaattaactctggagagtttgagtaatttagtaccagacctcaagagagaggggatgaaaacctcgttaattcatatgttggtgaacggcaaaccagcaaatttgcattaaaaatggatttttattttaaagcaaagagcagccagatcttttctgcaatagtttgggtaggagaatatctttgtatgtatgtgttcccttatgtgtaggtatttgtatgtttcaacgaccctgcatatggcaataacagaaaattaaatttgtgctctaaaatgaagaccaggattcagtgacataatcttccttgtgcctttctttcttttagtacaatgaatatatcagagaggagtgtattccaatatctgtcttcagagttacaaaaacttcttttctagaatgcaagacttgggctatacccccagctctgccacttaacttgtatacaaccttgggaacatcattacaattctctcagaatcaatctctccagccctaaaatgaaaccagcaaaagcctgtactgtatatctaaaaggttttttatttttatgaaaattagttaggcaaacttttgttaagcatccatcactctattttgagataaagccttgctggatgatctccacctcttttgatggaaagagtaaaacatgtttaagatacatttatcacttgtttggcaaattgagatagaagtttatgaaagcagattgatatatgttacatttgagctactgggaaggactccagatggtttatagccttaattacattgtaactctagttaaatgtttacctatctgtaccctctgttaaacttgaatatgttaaataccaaagtccatgtattattggattttctgtcaccatcatcaggcacagatcctggtacacaataggtacggaatggatgcatggatgaattattgaattagatgttggtaggcatgtggaaataagaatgaggttcagaattaaagataatctgtatcgagtgtaaagccattggcagagaatgaaatatccagctgagtatacatagaaaaagaaggtaggtagaaaaatggaaaatatcttatgaagtgatgatagaataactctgaatatgtttgaaaacatataaagagttatgtggatgttagctttaaaaattatcttccatgctgtacattagatctgccattcttcatgctgtggatgaaaagcaagcatcagaagttaaattaaaatgatgtcatatattcctcgccttacagtttcataacagaggagaaaagagaaacattctctcattgccaccacccttctccagtcatatttctaggtagatgttgcccaaaaacagataaaaccacagagttggttttgctaggaatggactactaatccaggcaatgttgacagcttttgcttctcattagtgcacgttactaatagaattgctagagattaaaaggaatcctttctacaaagtgctgtatatccataggtgacaaaattctagcttcccctcacaagtacaatataaagttatgttttaaaatcaaaatgcaatttactagcaaactagtaggaactgttatggttacaggaaatttgaatttcagattaactctggttctatgagtagcggttgatatggcaagaatcattttgatcttacatccaggtgctactaaggtctctctgacctatatctcaccaaaaaaaggaacaaaataatgatcctttaatctttctcctaaaatatcataggaaatgatagtggctaaattgcaaataaactaggaaggaaagattcagagtattttatgtgattactctataacaatgccaggccatagtgaaagtgttatttagcagaagactgagttctttgaatgttcctaatttatcacattttaaaaataacctgggcaaaataacctttcatatcagattgagcctttttctaaaaatactcaatatgtttctgtaattatacctacacacttacaattccacagtataatgcaccgataaagtatttttcatccatatatctaatagtagaatggtgtgtatacaataattaagctctttaggcttaccccggaaagcaacaagtttcccttcctttttcctttttatgtattatgttggccataagaaattgatgatattcaactcaatgcagtcttagagatttattcagaaataccatggtgtgtgtgtgtggcgggagtagggttctaatgacaggtcagaacttacttatttgatttcttcattgataatcaggtcttaaaaagaaaatgggtatgctgaaaacatgccttctgtgattctttaccttcatgtgcagttgtctctggataaacactttctttggcacgtatagggttgcactaagctttatagctccaacactccgccccttcagtagattcttgcttgtaactgatgataatgcaaacctgtattatctataggtctccttaaagggcaaccaaaagttcagtagcaattcaggcacaattactgcatgtgagaatcctccatcttgttccctttggagaccacatatatttcttaggcaagtatatttttaaaatccttgttcagcatgacaattcaggaggtcaagttctcccagaaagcagattctgagaaagtgattagcatgaaggaattttattggagagtgctctcaggattaacacctgtgagcggaggaaaggaaagggagcaggattgggcagaaggagaagctgggctaccatacagtcacaactacaacacaatcaaccctccgcctctccttcctagccttccccaggaggatctctgaagtctgaaggtagaatagcccttcagaattgtcctgagttgcagcaagggacccaggattttataccccacaactctcccatcaaccaatacgtgcagcccgtctcggggacatagtgggtaactttgggctaggcacctctctttagctgagtccagctctcagacaggaataacagctgaggactgtcagccagtagcactaccagcagctggggtcagaagtatttcagtcctgaaaaggggtccgggcagcccagcttagcatctactatgccagtcgttctcaaatctggttcctggcaactgtgattctcaagctttagcatatattggaaggcttgttaaaacacagcttgccggattttacccacagagtctctgattcagtagagctaggctgaggcctgggaatttgcatttctaataacttctcagacgttgctggtgctgctggtccatggactatgagaacactgtttcatgctgcccttatttacatactgagaatggtacacagtgctcttatgaatagaatgaaaaccttttgaaatcacattattccttactccatcaaattctcagctatttttgtgcaccataaagctggaatagctgattataaaactttgttatgtaaaaaagtacttaaccaatacagtagattctgtttgcaaagcattattacagtttctaatatctggtcattgttacttgtaaaattcagccaaattttctccagggcctgtagtttgataacttggacaaaggaatttaaaaaaaaatctaattcaagacctttggttttttttctgaacatatcttttttttctttatgattcttatttttacattttacttatcatataagccacttaaacccatatggttccggaaaatttaaaactatatgatacatttagagcatgttgaatgcacagatatggaaattaagtattcttgactcattctagactagacctggcacaattaaaatttagggattcaacgtacacacacatagattccgagagaaatgttgaagccgtaaaacccccacacaagcaggaaacaacagtcttacctattattcaagaggcacgtaaaggagctcatttgaggagattttctgctgttattgccatcgaatttttaacgtattttccaaattagaaaatattcagcctgatgttgtcaatatttcagaccacaagggtatcatttaggaaaatggtttcttactgtcctgaaagagttactgttcttccctaagggcctaatttacaaagcagcaaacttgctggtaggatttggctgaaaatcacattgtctcggtagaactctttcatctgatttatgtgcattgcattttgcaaataactcttggaaagttatttactagttactttctctggaagcagagggtaagcggcatttctagtttaaggatagaggagctaagatgcatcaagcgcagctcatcatgaagctgatgctgataaaatgcacaatattacattctctaagtttcactctgccatgggagaatttcatatttttaaattttgtttgaaattggactacattagaaaatatgtcaaatgtctaaccctgcatttatattctggaatgtgacagcttatttctgttccaaattttgcactggagatggagtaagtcttaatgcaaactgcatgaaactgccacttttataggtcacacccagtcaattgtcagcagttacacatggttcaaactgtaaggtgtatgcccaattgtagcattgagattcgtggagttgttgcagtggttctgaatttttcaagcatgatacataaaaagataaatgactcttttgatatttctccttgcattgatagtttgcctgaaaactagataagcagggagccggcagtccacgttagcccttgaactacatgaggtttaatttatttgcccaaccagaaccctacactacctttcagctgtgcagtattaaagtttatttaggagttgataaatagcttagtgcaatgcttccttttttccagtagctacatcctcataaacctattctaccctccaccagttaatgcagacagaagatttttatccagtatgagcactgaaactccactgtggaagactgtgtgctcagcaaaaacctcacccatgatgaataaacagctcttccgggggctttgctgccgctggctcggcaggagttgtttattgcctggtttgcacatcccatgataaagttgctgctgaaataaattgcagttttgcataattattgacaatcacatcttaacaagcaatgtgtatcatattcaagtgttcaattttttaaaatccatttttagcttatgtttaatcccagaaagtgtttgtgtagtaatagaaggcaaataagacatttaaatagagtactaatttcctcattgcagacaaagtttacctgaatctttttccataggactgttactgcctaaggcaattttcctttctaagctattattatatagatatttgctgagggcatatgtgtgtgtatccacaatacatgcattttatatatatatatatatatatatatatgatcaaaaatatgaatacatttttagagtttttgtcatgaaagagtttgtttcatctttttaaaatattacaggaatggggaaatgggatatgggtagaaggaactaatgtttttgagtaactgtaatgtataactgtataacgtggggcactcaacttcacaggaattttttattttaattctcatcacagcaatagatattgcagatgagaaactgagaatcagagagggaacttgccatatcacgtaagtggtaaagaacactgggaattgaactcagatctgcctagtttttaaaactctactctttttcattacacataacatttttattttggaaaatgttctcagttgtatgatcaagtagttaaatatgaaactaacacaataattataactgatgtcatgcaaaatgatagtttgcacaaaatgatagtttctatgaaatgttatttctttacttgttaagtctttcttcctttgccctccaatccccttctttttgtcttttcctctagtcttttccttttgattctaggtttgtattttcttgacttttctccttgcatatcaaatccttgttttctgcctcagagcagcatcaaagacaagcatggtacagggattttagggttttaactataaaggtttgtctcaaatttggcagtatattaaaaataagctttcaaaattgaccaacaaaaactacaaaattgaaaaaaaggtactttgaactttcacatgttcaaatatatgtatatatatttcacatatatatatgaaacctcctctgtggagaggggtttatagaaatctgtaattgtcattcttgcatgccttcccccatacaaacgcctttaagttaaataaaaatgaaagtaaatagactgcacaatattatagttgttgcttaaaggaagagctgtagcaacaactcaccccattgttggtatattacaatttagttcctccatctttctctttttatggagttcactaggtgcaccattctgatatttaataattgcatctgaacatttggtcctttgcag

SEQ ID NO: 2146 - DNA, 50 bp, Homo sapiens
  source 1..50: mol_type = genomic DNA
gtatgaattacattatttctaaaactactgttggctgtaataatggggtg

SEQ ID NO: 2147 - DNA, 55 bp, Homo sapiens
  source 1..55: mol_type = genomic DNA
aaaactactgttggctgtaataatggggtggtgaaactggatggaccatgaggat

SEQ ID NO: 2148 - DNA, 45 bp, Homo sapiens
  source 1..45: mol_type = genomic DNA
cagctaaactggagcttgggagggttcaagacgataaataccaac

SEQ ID NO: 2149 - DNA, 40 bp, Homo sapiens
  source 1..40: mol_type = genomic DNA
ttctctttttatggagttcactaggtgcaccattctgata

SEQ ID NO: 2150 - DNA, 250 bp, Homo sapiens
  source 1..250: mol_type = genomic DNA
gtttatagaaatctgtaattgtcattcttgcatgccttcccccatacaaacgcctttaagttaaataaaaatgaaagtaaatagactgcacaatattatagttgttgcttaaaggaagagctgtagcaacaactcaccccattgttggtatattacaatttagttcctccatctttctctttttatggagttcactaggtgcaccattctgatatttaataattgcatctgaacatttggtcctttgcag

SEQ ID NO: 2151 - DNA, 60 bp, Homo sapiens
  source 1..60: mol_type = genomic DNA
aattgcatctgaacatttggtcctttgcagggtgagtgagcgagaggctgctttggaaga

SEQ ID NO: 2152 - DNA, 190 bp, Homo sapiens
  source 1..190: mol_type = genomic DNA
ggtgagtgagcgagaggctgctttggaagaaactcatagattactgcaacagttccccctggacctggaaaagtttcttgcctggcttacagaagctgaaacaactgccaatgtcctacaggatgctacccgtaaggaaaggctcctagaagactccaagggagtaaaagagctgatgaaacaatggcaa

SEQ ID NO: 2153 - DNA, 53 bp, Homo sapiens
  source 1..53: mol_type = genomic DNA
gcgagaggctgctttggaagaaactcatagattactgcaacagttccccctgg

SEQ ID NO: 2154 - DNA, 67 bp, Homo sapiens
  source 1..67: mol_type = genomic DNA
tttcttgcctggcttacagaagctgaaacaactgccaatgtcctacaggatgctacccgtaaggaaa

SEQ ID NO: 2155 - DNA, 47 bp, Homo sapiens
  source 1..47: mol_type = genomic DNA
tcctagaagactccaagggagtaaaagagctgatgaaacaatggcaa

SEQ ID NO: 2156 - DNA, 60 bp, Homo sapiens
  source 1..60: mol_type = genomic DNA
ggagtaaaagagctgatgaaacaatggcaagtaagtcaggcatttccgctttagcactct

SEQ ID NO: 2157 - DNA, 120219 bp, Homo sapiens
  source 1..120219: mol_type = genomic DNA
gtaagtcaggcatttccgctttagcactcttgtggatccaattgaacaattctcagcatttgtacttgtaactgacaagccagggacaaaacaaaatagttgcttttatacagcctgatgtatttcggtatttggacaaggaggagagaggcagagggagaaggaaacatcatttataattccacttaacaccctcgtcttagaaaaagtacatgctctgaccaggaaaacatttgcatataaaaccagagcttcggtcaaggagaaactttgctcagagaaataacttagggattggtttattaaattttaaaagttgacatttttgagtgtttatttaatattttacagggaaagcatctgtatgaattgtctgttttatttagcgttgctaactgaatcagtttcccttcattactttcaaatatgttttgaaatgttaatctggcattttgtagctttcttcctaacatgatctgtgaaaataagaatgagatggctgaatttgtcgtagttaatgatcaaacaattttcagacaattgtttttcctagaaacaaaaattatttccataaagttccatatgcataaacagtgaaaacagaacgtggggtagttttgtttaaatgaagtcttggtgagaatcatattctgtagtacaaggaggctcttaaagtttattctcaatacctgatataattttcctgaactattatggagttttgttatgtatagttggtttttctgacttgatataataactttactagtctctcaaatacaatttggatataaatcattataataagatgattgattttttagactaactttattttttgatatttttaaactattatgaaaaactattatgaaactattatgatatttttaaactattatgaaaagtatattctagtttgaataattccagaatcaaatcataataagcagaagttcttctcctctccctcctatcgttctccttctcctgtttttcttttttgatatgatagttgatctactttgctgctctgttgcatagagtacgtaacagtggcaatgtatggctcctgaatttatcgttcttgcttcatcatcctgctttgaccccactttctcctccaaaatgcgtgttgagttagtttgatcatttggaggtaatttgtttggaacagtatcagactttatagatatctcccatggcttgtgatagaatataagggcaatgcaaatgtagagttttttgctcactcttcgatgtatggttagacaatgtaccactgtaatatatttggcttaggctatttcataaataaaattttattataaaatattataaatgctgataaagctactccagaattttaatagatatgtgggtttcccggccagatgcggtggctcatgcctgtaaccccagcactttgggaggccgaggtgggtggatcacctgaagtcaggagttcgagaccagcctggccaacatggcgaaaccccatctctactaaaaatacaaaaattagctgggtatggtgacctgcgcctgtaatcctagctacttgggaggctgaggtgggagaatcgcttgaacccaggaggcagaggttgcagtgagccgaggtggcgccactgcactccagcctgggtgacaaagtgagacttcatctcaaaacaaataaataaataaataaaaatacatgggtttacattttacccatcagctatggtaggtaaataataagctttgattaagtctattttagtctatttttagcagattactttgaaaaataaagaataacccaatgactaaaaaattattttatgtcagggatttaataaaacatatctttaaatctagttgagggcaaaaatacgtctattttctactatacaatttgtatttatatctgctgtattatataatgaaaatttatctctatttctaatctcaagaaactgcaagcttctgaatcattaaagggaagattcaccatgtgtcctaactatatttactatggaagcatggaaaataaatattttatgtttagatttctgatctctctttcaaaagcagttggaaattatgctgagaaaatgtcttagcttatcccatgttactcaagaaaatgtatttattcgtttttgtccagtggcttaaccaaaccacagtttatttgttgctcacataaagtccagtgtcgatcaggctactcttttccatctttgagctaaggcacatattacacataactttcagtgtacccgaggtagaaaaagagagagcttgggaataaggcaggggctttttactgtctcaaccccaaagtgataaactacatttattctcaaaatccagataaaactcccatagagcctctgaaaacctcaacatttgcgtcttaactataataaggttaactaagattccaaaattattttaaaacagagacagtttccctcttccctggcagctaatattgtattttctataaatccacttgcccaaggtttaaactacattttatggattgaaatgacatttatagccaactcctgatttttagttagatggttggataatgatcttttgatgaaagactcggagatgtcatggtaaaacggtgaactactgaaactattgattattgttaatggcacatttcagctgattgaattgagtcaagaaactggtgttgaagagcaacaaatggaaatgccgagcttgaaaataaataaagcagcataccttaagagattacatgcaatttcagtatttcagctaaatggaagtgtttgctttttttcctctatgaatttttattttgaacaaaaggaattttctataatatgtaggtaggagaaaagtgaaatggcatgctttttcacttcatttgaagaagctggtagcattgtattcatagattcatgctgtatagcaatcatagttctcatatattaaaaaaaaaggaaatttgaaatgcctagccaaagcaacagctctgccaacagattttgatatatctgtctaccccaaaagtagtgatgatttacttcatacaaatgctagtgaatgaagagagagggtgaaaaccttcacaaaatgtgtttttctctaagactgtcaatccgtttttctatatatggagactccagctcttgctagactacctatcactttcgtctatcagccacttcgtaagatatttattctctcagcaataatcataattcatagattctttaaacatacatgtaatataaagcatatacattctgaatggaattaacatgattaattcttctctgaaagacattagaatttcctcccgtattataaaaaggtgtaactcactttccttactaaaatcaagaactttaccgtcgtccttgtacttcaggataagggggtgtttcttataaatattgttatttctgatatgctaactggaatttttaagcaaatgtatttttatagaacgccatacaaagcctttaggggtgaaagtttcaggatttttaaattgcagatttatcctttaaataaaaaaactatattcgtaattgaatcggattatttctctatccaaaacattttctgctttgggcctaagaagagttgacaaagctgttcatggttcaaagtactaccataaaaccctgggtaactaactgaaaatggaaagactctgtctttctgaatatttcacaagagtttcacaaatattaagtggttctctaagtacccctgagagatcattgtaatattagcttgtaaagacaatgtgggggtgtgggtatgtggtgacctttatgatgttcataaaggtggtgtaattaacatatttttctcagcaagacaaactaaggagcaataaatatatgagataccttcatctgtgatctgggtcatgtctcaggccatatctttcaaatcactcccttccctaatctcgtgttttacctacgtctcctctcaatccccccattataaaaattgtcttctgatgaataaaacatttccagagagacaagtttcataaagtttgaattgtacatctgagtacacctatgaattaagatatctttgatttctaatatgttattaaaattgggtgtggtggctcacgcctgtaatcccagcactttgggaggcagaggcgggcggatcacgaggtcaagagatcgagaccatcctggccacaaggtgaaacccccgtctctactaaaaatacaaaaattagccgggtgtggtggagtacgcctgtagtcccagctactcaggaggctgaggcaggagaattgcttgaacccaggaggtggaggttgcagtgagccgagatggcgccactgcactccagcctggtgaaagagcagactctgtctcaaaaaaataaattaaaataaaataaaataaaattggagaagtttctcaccaaaattttggcgcacggattaattctgaagaaagaagaaagaatgcaatcttagtagcacaattagtaccttgaataaattggagtatcgtatttcttggactatctgagaatgcagaggcaatttaaggatccctaattctaaggagaagaaacctttagtgtattccttcctgttgctttagtttgaattgagttttatatgtattttttaatctttctattttgattgttgtctaaagagtgtgaaagtgaattttgatatttttattttgcctggcgatgaatgccttctgctctggatatttaaaaattatatacacatatatgtgtgtgtgtgtgtgtgtgtgtgtgtgtatatatatatatatatatatatatatatataaaatttttctgagaacttttattaattcagcgtatctttgctaaacacctgccatgtgtcgtggtgttaggtctggtgatacaaacatgttcagagagatgattttctttcttttttggggggtgggtaagggaaagaaggcttatacaacagaatcttatttctcacagttctggaggctgggattccaagatcagggcctggtgagggcccctcttcctggtttgcagatggcttccttctctctgtgtcctaacatagcaaagagagacagagctctgatgacacttcctcttgttataagggaactaattccatcataagggccccaagaaaggtgcttttcaaaaacagttcagtaaaagtactgggttgtataatcactttaatgagtatcaatccatatttttaagatagaaatgaatgaaattagtaaaatagaatagaaataaggagtccatcacttttaagtaagtttcaatattgttcgtaaaactttggttcggtggtttgtgtgtgtgtgtatttgtgtgtgtgtgtgtgtgtgtctgtcggtgtggaaatactggatcactttgtaacatatattcaaaagcctctgtattttaacattatttctgcctttgagaggttcacattccagaggtgaagacatacatcctaagacaaaattataatagcattatgagaattacagtagagagctggacagggtctagcaaaaacagaagactaggctaaaccttccaaagaggccaggaaactcacctagaacggtggattttaaccttgcttatgcactgggggagattttaaaaatatctctgcccacaatagataccaactgaattgagcatagcatgtcctacccatgaatctattgtccagtgagaacctctgtttagagaaagtcaccttagaagaattgttaggagttatttaggttcatggggttgaaaagagcattcgtgatagaggaaacaccatatccaaaggcttagtcagtgtggtagtgtgagaatctgaaggaacttggctggggtatggttgctacaagaaatgaaattagatcaactggggctaaattatgtggaaagacagcatgatgtagcagctagagtatggaccttgtaagcaggaagaccccttatttagcacttactagcttattgtctgacctctgagtcccaattttactcttctatacaatgagtacatcacaggattttatcaggtttaaatgataagatatatgtaaaatgcataccagagaggcagactattggactcgaagggctcagtaagtgtaagctggctctctctgccccttgccacctatttttcagactctggacttttatcactttaagtcatagcctagttctaagcaaggaaatggactaatcagacatgtttttaaaagatcattctggtagtggttaggagaatgaattggaaagatatgagacccatgcagggacaacagttaggacattatttctgtaataagccaagcaagaattgatgatcaaagtggtgaggttgaacaaacaaaacagatacgtgagctatttggagataaaatcaacactgtcatatgttttgtgggaggtggaggtgagcagaaaatgtgaggtaaaatgagaaatcagtgcctgcttaccacttggcatgattgactgaaggtagtgtcttcactcaatcatgagttgcagaattcaagatggcaaacagttgtgaggagcaaagtcaagaacgtgtttgattttgaggtatctgtaagtgaaaaatcagaggtgaaaaccttacctctcttgaagcagttgtgaatgtaaatctaaggtttggaaaaagatctgggttaaagatttaaaattgaaggacatcaacatggaagccatagaaataaattatattacacacaaatttatgtcgttatttgaatttctccatggtccactcagaaatatatctaaatgtcaccaaaatgttacttactgtagtacagaattggtattaagtgatactattgtccatgttattcaaaaagacagttatagggaccctcttaataaactaattgtgaaaaaggcaaagaattagcaaagctttggcataaaattcatatcatgggccaggcgtggtggctcatgcatataatcccagcactttgggaggctgaggtgggcagatcacctgaggtcgggagttcgagaccagcctgaccaacatggcgaaaccccgtctctactaaaaatacaaaaattagccaggtgtggtggcacacgcctgtaatcccaactactcgggaggcagaggcaggagaatcgcttgaacgtaggaggcagaggatgcagtgagctgagatcgtgccattgcactccagcctgggtgacacagtgagactccatctcaaaaaaaaaaaaaaaaaattatgtcatggaaaaagtaaaagtctttgcataatgtatccaagatcatgaaaaactcttttcaataagataattagttccttttcttatataaacatggaaattttcatttttccttttattctcatattgatactataaaaaccccatcctcattcacaatactactgtctctaccctcgatagataccagttcaattgaacgtagcatgttctacccatgaatctattgttcagtgagaacctctgactataatgctcaggaatactcaagactcacatgattgtcttcttgctatatttagttactttattattttccattttgggaccctgaattcctgtagatctcagagaaaatccgaaatgaaataatgaaaataattaaaagtttagaaaagggagtcaatggggacaaatgttcaggactggtcttttatctcctgcaggaagaaagactgaatgcagaaaattagaatccatttttcatccagtcaccccaatttaatgcaatatgagtttagctatttgattttaagtgttgtaccgttttggaccatgttaccatggtaacatgaaccatgtctcattcatacgtaaacatgttaattgtattaaaacctttaaaacctacttctggatgttgccattacattaaacaattatctagaatgatacaaagtaatgactaaattgaataactttgtaaattaactattggattttgtaattttatatctataaaccaaaagaaaagcccacattggtaagaagacactgtgcatactgaaaagtcaattttgttagcctccaataaccattgtgttttattcctcgcagagcttttgtgaggatcttataagggaataaatatgaaagcactttgaaaaagctttcaagtgaaaggtccttattaattttatgaattaccattaaacaaaagtcaaactgaagatgtaaatctaataggatgctcttaaaagtcaatggatcaaagttatattaattaataaagaataataactaaatattttatgtttcataattggcaaagtatctttactgtcattttctaatttgatccttagtgaaaacctgtgatgttggtactcctattatttccattttcatttgagaagaataaaattggagaggttaagtaatttatctattgctacttgttaaaataactactaaattttattactcccagttaggagggcaattatataaactaaaagcttgtcacaataaatgtttacttttctgggattaaagtcatcatgtatttttcaattattaaggggggtaataataataatagctacctttttaaaatagttactatgtgccaaggtgtgtactaagtgctttgcttgcatgatgtaataccatcgtatatttagtacagaggaaaaactgagaggctgggtaacttctactaaggtaacacacaagtactggttgagtatcccttatccaaaacacttgggaccacaagtgttatggatatcaatttttttctgattctttttttggatttcagattttttcagattttggattacttgctttataattatgggttaagcatcccaaaccccaaaattcaaaattggaaatactccaatgagcatttactttgagaatcatgtcggcgctcaaaaattttcagcttttagagttttttggattttggattttcagatttgggatgctcaacccgaatatatagaaaagtcagcatttgaacctaagtttgactttctgatcttctaccaactctactgtcctacccattactctacattgactcagcattacagggaaagacccaagatcaccaaaagcaagcttcaaatcactcatctaatagaaattagtggaaatatttctacttcctaaacatccatctttcctttacattttaaagtcaagtttctacatctgcctcccaactgaaacacttctctatgaaatcaccataactaccaaatgcaaatatttttatcaagtcctcattgccctagaaatctactcatattttgttattactgctcactacagcctactgaaaaatgtctcaccttttgacttgccagggtgatatattatactaattgtctccttgtctctctaagcactcattccttcctctttctttcttctttttttttttttcacttttattttaagctctaggggcacatgtgcaggtttgttacatgggtaaattgcatgtcatgggagtttggtgaacagattattttgtcacccagataataagcatggtacctgataggtagtttctcagtcttcaccatcctcccaccctccaccctagagtagatcctggtttctgttgttcccttctttgtgttcatatgtactcagtgtttagctccacttataagtgagaatatatggtatttggttttctgttcctatgttatttcacctaggataatggcctccagctccatccatgttgctgcaaagaacataatctcattcttttttctggctgcacagtattccctggtgtatatgtaccacattttctatatctgatctaccattgatgggcatttaggttgattccatgtctttggtattgggaatagtgcagcaatgaacatacagctgcatgtgtctttatggtagaatgatttatattcctttgggtatatacccagtaatggcattgctgggttgaacggtagttcagttttgagttcttagaggtatttccaaactgctttccacagtggctgaactaatttacattcccaccaacagggtataagcattcccctttcttcacaacctcaccagcatctggtattttttgactttttttttttttttttttttttttttgagacgaagtctcgctcttgtcccccaggctggagtgcaatggcgcaatcttggctcactgcaacctccacctcccgggttcaagtgattctcctgcctcagcctcccaagtagctgggattagaggcgccttccaccatgcctggctaattttttatttttagtacagacagggtttcaccaggttggccaggctggtcgcaaactcctgacctcaggtgatgcgcccgccccggcctcccaaaacgctgagattacaggtgtgagccaccacaccaagcccacagtatcaattctatgcattcttttctgatttcattaatctcattatcttcatttgatatttagtcaatagttactgtcagttatgtgttagttattatactagaaacagtcttttctccatctcctttaatccaatgatttgaacatttttattcctttccaatgtctgtcccacatttcttactgtatgtaggacatttcttactcaaatgtctcacaaatgacataaattcagtatgacccaaataggccattttttataccaagtcttatttcctatcctgctgttcatcccggtaccatcttttcagtcagagagttcagatcatatagtcatttctaaatctcccacttacttgcctcactttcaagttcatttttaaggtctgtagattctgcctccctaattctttatgaccattcctttctcactagccccttacctccactctcattcacactcttactattttttaccctcctccactcattcctgcccaccagtggctccaatccaacttgcagatttccatttaaattaagcttcctaaaacatagcttaggttgtaactacaatgcaaattccatgagagcaaagatttcatctgctttattcacttgtatatatccattgtccaagactgtgtgtgtcacatgaaaagtgttcaataagtatttgtcagtgaacgaaaataatatatgactcccctcttcaaacaccttttttgacttcaaagcccttcagaatattctacagactccttcacctggctctccacaattgcccctgagtctcgtttccaatcttatttcttattttacctctcaatgcaccttcaactcctactaaaatgaacagctagccagcttacttctgtgtctttcgatgatcttgttttttgtcttgagattcctttttttcatctaagcttacccaaacattacctacttttcaaggaaagccattttcgaatcttccctttttccctgagcccccaagctggaagacatcttgtctccatctcaattcctataggcatttctctgcactttaaatgacgtttagtacttctgacattgcattagagagaggctggggtggatagtgtttcatagtgtgaactttgaagcccgactgcctgagtttaaatcgtgattctggggcttactgaccatagacgcatttctgaattgctctcagattatggagcataaatcaaaagtaatgacagctacctcttcaggttgttgtgagggtgatgcgaattaatgtactgaagtgcatggaacagtttctggcacacggtaagcacccaataaacatagctaatattatgttattactattttcaggcttatttttatgtatacatatagtatgtaattttatgtcaatatgtataaatagactttggtattgtttatttcactatcaccttgagagcacaattctcatttgatttgtgtgagaaactacttagaaagaaatagacgtgtgaatgaaactatgcttgaaatattggttactgtgagtgttgaaaatccattttgtttaaagaaagcttcaattgttaatcttccataaattttagttcttaagcgttcatattgactcgttttggaaaagctctttaaagtcttgggatataaacaaggctgaataccctcattcatgataacaaacatattatactgaaaattgtaagagagatattttatctttcataatgccctccttgggaaaatacattgacttggcccttctctttcaatcagacaccaaagttgagattgcctgaaacacagtttggtaaaaggagtttctttttcccaaacatcctgagtaacacaggaaatcacaccaatgactgatagataacgttaataaaattaataaagttgttttaaatgcataccatggggcagtggcaatgaaaacattgagaaggctgggactatttgccaactttctttgatctccattagaacctggacaagatccacataatttcagaacttcttctccaaacaagaattgaaaaggtcaggaaaagtttgaccacagaaaaatgtcaaagaattttgtgtcactttctcctcctcccttcctctaaccttgaataattttttagggttattggtctttgggagcagactttctagaccaaaacaaaaaaaatgatattcctctatgtgataggtaacaatcactacccatcctactggaaaattctcaaagtgtaaattgaggggataaaaaaagaatcttaagtcctttaaattatttttaagatgaactacattagtgcctctcttgtgcctttcataattctgataataaaacattccaggtattagtcaaagattaatggtattgaaaataatttaggttatcagcatgtgattttcattccacatgaggtccttttgcagtttacatggttttctaaattatattaaaataaaatgtcagaaagttcacatttttttcatgtttaacagcatcaatctttaaagaaaagttattgcacaaaggtctgtgcataaatcagccattctccgaagaggtaaaagaagtcattacgcctggttatgagagagagtttcatgaatgtaagagacataaatcatttcccactggagatcatattagtctagatggaagaatgtctgtttcttgatagtgagaaagcaacaaattacttttgtttgctcctgagtctgtggttgtccttgagaggtctgttagcatgttgactattgactattcaatattagcattataataacttacaatgatctgagtcacataaatataatctttcagttctctaaagattttactttttcctctctaatatctattcacctccaacacctttgcaaatatattattctctgggagttacaaagaaagttattctctgcaggaagcagcatttcagttgctctcaggagccaaccacatttcacctcaattctttgctcccaattcaacaattcaatattggattaaattcaaggctgtgaccccaaatagaatgagacctggatatttatgaaccacttgaccaggcattcttcccatgatttactccataaatcctttttagtttttgcagtagctttacaaatatttggaaaatggctgtgcaatgcagttttaaaaagtgcaatgagtagaggtagcttcttcacctggtatggtaaattgttgattctcttttggagtggaaaacaagtgttcttatttggatgcaaccattgcattgattagacaaccctaaattcatctttcatccatgacctgaaagaaattttgaaattcatgcaatatatacccgtagtggaaaatgtactttttgaatggattcctgaatgtgacttttaagaagagctattaagaagtgggatcttctacagaacagtaaacaggcatgaaaatatacaagttgataagatatggaactaccccaaaagaggaattaatagtggtggggcttggggcaggaggacagagagacctagccaaggaaggaagggctatattataatagagtacaaagtcctttagtcatccaagagaaggggcaccttctgcatcccttatgagtaagatcagagaaggtattctagttaacttttgctacataacaagccagcccaaaacttcatggcttcagtaaaaattacttgttttgttcatgaatctacagtttgctcaaggttcaatggggcttgcttatccctgtttcagttgatatcagttggggtagattgcctgatgctggaggattcacttccaagagggctcactcacatgcctggaaaataggtgctgactgtcagtttttcttcatgtggacctctccatggagcagtttgggctttttcacagtgtaagagttgggtcccaagagcaattatcctaagggacaagaaattaaagctgcaagcttctcaaggcctgccctaaaagcaagaatggttttgcttctcccatattctatttgtcaatcagtgacagagctctgattcaaggggatgagaacataaactccacctttccatggagaagtatcaaaaagttttgatgccatttaattaaagctgccatacaaagtttcttataaatgacactgagctgaatgaatactaaacagcaagtagtcattatcccagtcaagagaagttatctttgctcagaataccctttctctccttgtctacctggaaaattcaactcttggccaaagccctacctcttctcgaaagcattaccaggccttgcctctaagtgtacaattggagatacaccagtatactgatgtttttaaaactttaaacttttttctacaataaaacataaattaaataacttcccttctgacttaaaagctgcaaaatgctcatgacagtaactatataaattaaaattaaatcttaagcacgataaatacctctcgaatagcaacatagatgcttacttctttatttcacttctttatttgcttttctttgtctatagtttgccccaaaggtattttaataatatcgggttccatgtataccagtgtgtaccaattaatatttagaatatacctgttaataacctcatttgcatagccctactaatctgagcacagcgcagccttaagaaagtcttagtttttctcagtttagttcatctctcttctcttctcctcctgtctctcttatttcctatttctttttcttttcaagtgactttcaactaagtagaaaatgcatttcacatcactatgccggcctccaggctctgtctatttcattcacccaggaatgccctttctgaatgctttctctcatttagcagctatctattgaagttggacaaatgatagaaattcatttcttaaagagccagaacatcatcttgaacaagaagttaaaagaattcagcaaatcaaaagatgagctaatatgggtgaatcttagaggcattatgctaagtgaaataaaccagacacaaaatgaaaaatattgtatgattccactggtatgagctacctacaacagtcaaatttatacagacgtaaagttgaaggatgttaccaggagctggaggaagaagagaatgagggcttattgtttaatgagtacctgagtttcagtttgggatgatgaaaacattctagagatggatagtggtgatggttcaacgataataataatataatattaatgtacttaatagtactcaactgtatacttaaaaatggtcaagaaaatggtaccccgttatcctgatgtgattattacacattgtaggcctatatcaaaatatctcatgtaccccgtaaatatatgcacctactatgtacccataaaaaaaatttaaaggctaaatggccaggcattgtgggtcacttctgtaatcccagaactgtgggaggctaaagcaggaggatcacttgagctcaggagttcaagaccagcctgggcaacatggcaaggccccatctctacaaagaattcaaaaattaactgggtgtgggagctcatgcttgtagtcccagacacactggaggctgaggcaggaggattccttgaacccaggaactggaggaagcagtgaatgacactgtaccccagcatggtcaagatcccaaatcaaaaagaaatgattaaaatgatcaattttatgttgtgtatattttgccacaatacaaaaatggggaaaagcctattcgcttttaagtatccttaaaaaggcacagcttcttcagctaacagactctaaaactttttttaatagaagtattaaggtatttagagagtgcaaaatatcttattttaagtcaagaagttagggtcctgttcctaaacactagcctctgtaatcctggggaagtcagtgctgttggagatctcaggttgatcttctgaaaaatgatggatctaggtaaaagatatgtttctccaggtttacataccacggacaccatctttacttggaaactttattaaaaatgcattgtgtcagaagctctctggggatgggtcgtggaatctgcatatgtaaagagcccctaggtagttcttgtgcccacttaaatttgagaaccactagaccagatgttttgcttatggccctttcagctctgaaatttgaaaaaaaaaaaaatgattctgcaagacagagtctctgtgcttttgcaggataaagaaatgaagaaaataatacttcctgcttgtgttggagcatttttttcatttggtatccccatctccagtggctagccaatcaagaatagtattgtttattcttcccactgttttgaagatacaaaaggaaaagctaagccagatgacacctaaaggcttccattaccattttcatgtttttccctttgcataaaaactgtccatgcctccatcagagccatgatcactagtacaatgttacactctaatgactcatgacattaaattatatcttagcctaatatgaccaaattacaatatcagaataaaaatttcttttttcaggttgaatcccataacttaatccaattataatactggctgaatttttcacaattatgtctcagtcttgatttagggaatcttctctttatcataaaaatgcattttgttaaacatgtttcattataatcaatttctcaaaagtaaagttaatcaagagaaggaaaaaaggttttgttttgatttgatttggaatgtgtatgtgtgtttactgtattgaaatagattctgtctgaaagactgtatataagataaaaagtacagaagagtagtcagagagttattacccacccctgactgatggtgaatagattatctaagtatcccgtaaaaggcacaactccttcaggtatattttacaaattaattagtaactttctagccaaatttgtgtcttaaagacaccagctagaacttggttagttctagcaaagaagattattttattctgaaacaggtttttgttgtcgttttacttatttgaacttttttcttgaatatgtatttctttgcacataaaatatattgacttatgaatgtgattaaaatggaaaataattagttgattttagagagacagagagaggagaagagaagtgtgaaggagagagggaggatagaaaggagagagggagaacaggaaggacagagggagaatgggaaggagagggagagagagagacagagagagaggaatggagtgggtaataagcaagagaaaaatgccaatcatatgctttgctagtgtgtaaagtctgataacccaagggagagaggactactctggcctagtgaaacaaaggaaagagaaatatggtagaatattctcctggtgcttcaccaaatgtgacaccagaagtctgacagaagtcatgtcagcatttgagctccataaaactcaggctatcgacctaccatgtgagagtctcaaaatgagtttaggtaggggcagaggagttgaaatccagtaacatatgcaacagtgatcacaccaggattgcacatagaaagcaaattagtcctctaatagagacgccaatttgaaattcaccctctgagcaggtttttaagcacactcttcttttacttttctatttacaaaaatggaacaccaccagaaaaacaagaatttgaaagacgagatgagaaaagtaagttgtaattggaaacagacagaatgtgtacacaaacacacacacacacgcacacacacgtgcatgcacaggtgatgagagagtagtttgcctacatggtgtatctgactaagaagactttttgctctggttgtcttacaggaagtgactaaatctcatgatgtgaaatattttcttgcatattgtattggaaaagaaaataattttcccaaactccttaggggcagtgttgtcttataattcccatatagtatatgctcttcaagtaagtaactccagagttgagtaagacaagactcgtgactcagatggcatgctctgctccctagactagacattgcatcagtctgcctatactcacatccgctgttaaaggattgcctccagtaaaatatgtcttttaattccttatacaagaatctggaaaaaaaaagtaagattctctatttcttaaatttagcagcaggttaatcactgataacaataaaaatacataacaatcatctagcacgggtaaatattgtggcaaaaattacaccctgaagaattcagtcaaagatataagtaagtacacatcattgtcatgttccacaatatatcatctgctttaaagaaactgttatgtagctgtagtagatttaatcattaatcccatttcttctccaccttctgcaatcacaaccttaacaatgcctccttatgagtggaatgtacttcccaacccctagtcttaggggttggccatgtgatttgctttagcaaatggtaaatgagcaggagtgagaggtgacagttttcagcctaggccttaagagatctatacattcctgtttgtgcttctgctatcattctgagaacacgtccatctaggctgctggtctcaggaaaacgataaaagacatgaacagcagggctgcactagccattcacatccaggaaaagaaatgattgttgcataaagccattgagctttattctacattactgtgacaatagctaattgaaatagtaaatatactttggtttttcctaaatgcatattgaaaattaataatattagccatctgtatgataaaaatataaagcctatgttttattttttaatggttcactgccctaaataaatttccaaaaagtagatgttcccttgtctagtgatgtcattatattttatttatacatcataaacacactgtttatttctgctcatttttttgtaagtaacatgtgttaccgccaatcttgagatgatacacacacttctgtactaaattttggaaaacatattagctacccactccttatatcaaaatattgcctaataatgtgttttgttttaatccttcatgaatttccaggagaactgaactgatacttgggtttgtgagatatatgaaaatagtgaacatgaacttctggtttaacccttgtgatgataatggaatcatagctctgttaattactcttgtggtttgtcttcctagagataatcatgtacaaaattcctttccaatttgttatataatattagaaatacttccaaaattggcatggatttattgttatcatttgttggcacaatcattaaaacgaaacccataaagctagataattaaatgtttacaaagctatagtactcaaaacaaaaacactgtgaaaagagattttttaaataatagtttttgcatgccttttgaataattggattattctgaatttcttcatgtttagtccctgaatctaagtcataccgtctacataaaaatagatgtcagctgaagaaaaccaggcaatggatttgtcttgacgacaatctttttatatgttcagacttcatttaacattagacttgtctgtatttgaaattggtatttctttacatttctgaatttagggaaatggcacaagagaataacattaatttcctctgcattttggcctaatcaaatttgagcctttcaagagacacagccaagtcaattcaaagagacatatgaaaagactactgttaatgtatctttaaaatgaattagcggcatgaactgttgctaggtgagttaggtatagttgtagtttttagtaaccctaagagaagatgcagtgcattctaaaatgtcacaaggagtttgattgctcaaaattctgggagattggctctctgcaaggcttcttgatgtcattgttcctagaggaatgttgttccagtacctatagcgattgcagccataactatttatgtgtcattgtagccattgttattactacatgcttcacatacctctactgaggtctaaagaattagtggacttcatattctggagagaacacttgaagaaccaaacagaagtttgatgtgaatctgcatatccaccattattgttcataggttctcaggattagttgagtgatgccttaaagaaagaaagtcagatgataggtcttcctgctgcccgcaccacatcatgagtgttattcctatagaggaggagtaaagagtgggaagaaaatgaaatctgtcaatactgtgaatatataaataataaaagtagcagtaggactgattaattctgaatcatctttatgaaatgactggagccgtgaaaatgctcagtctgcacagctgattgagaaatgtatgcaatctgttgatcggaatttatttgtgaatgctctcttccagagatttatataccagagttcttaaaacgaattttgtccccatgaaaagaaaactacagatctgtaagactgcaatttaaaatggaagaaaacatgttcccacttgaagaacaactttcaaacaaacaactgatacaaaaaagtcaaaagctgttttgttttatataatagtttcagaatacttccagtcaatatataccttggtttggtgaaaaaataaaaagctaaatccttagatcattaactagaaatttttgtaaaataaataaaagccgtgggttttagtgcagtgatcccatgaagaggaatatattcaccattggtctcttaatctcagatagaatgtacatgttactttattttataacgaaagcaactgtgttgtgatattatgtataatattataacaggagaagtcctcttagctaactcagtaatcaataacattgtacgttgtgtgttattgtaaccaaaaactatgacagaaccccatttcataagatcagtttatccacctatatgatttatatttgaatattcatttcagtacttatgttgcttaaacaaagctactgtattagtccattttcatactgctataaagaactgcccgagactgggtaatttctaaaggaaagaggtttaattgactcacagttccacatggctgggtaggcctcaggaaacttacaatcatggcagaaggtgaaggggaagcaagcatcttcttcacaaggccgcaggaaggagaagcgcccagcgaagtaggaagagccccttataaaaccatcagatcccgctatcatgagaacagcatgggagaaactgcccttatgattccattacctccacctggtctctcccttgacacgtggggattatggaggttatggggattacaatttaagatgagattgtggggtggggacacagccaagccataccaaaaactctgttttttgtttttgtttaatggaaatgatttagaactttattttctgatgtttctttttcataaaaccacgacaccaaaatctacttttcactgctccattcaactagtagagaatatctaatctcttctcaagtatttctttctcaattatggtggttttagctaagaacagcttatggcatgcttttctaaataatattagaacacataaattatctgtacctggtattaccacattcattgctcattttaagatctcaattgatacattcaattcatatatatttaaaattgattcatttagagcaagagatacaggcattttaatgtattacactgctactaaagcttagcaaattattcttttttgtgcccacaaattatcatccattcatgtcctaaaaataaaattgaatttattatactttcccatttatccaaaaaaaaggttttttttaacaattgatgcagatacacattttcaagctaaaaatatgtgtgaaagtggcctctttctcatagtatttattttaggagtctagcaataatttttcttaggttatcagcacatgtcttagcctgaattatttgaattcagtctgtgtcttcaagttcagatggttatgtgatcttgttaagatctcaaagtagtgggaatgatggagtatacaacaacctcattgttttttatggcaactgtcatttactgaaggacataaggctagcagaacatggtcagagaaggaatcaaagtttggtcagccaactctgctccacagctacaagctgctagacaggcataaatttttccaaacctacacaaagggacttagggcccttggctgagagcgacattctaaccacttccttatttatggctggtggggtttgtacattttctcatttctgtataacatttcttgactgtaataagcaatgtattcattctgctttaccactttcactaaccttaacctcaatatatactcaattaagcaattgaaaacagcagttttaatcttttgacataaatgatttcctccgaagcaaaatgctggaaatcccctcaaatgcaccttttattgatgaatacctataagcaccacctacagtcgctggaggctgacaggaaccaaacttgatgataaccactgagctgagaattttcaactcactctttttccctgtatggttcttctagctgcattatttcccactatttaaagctacagctggtgaactattcaaatatttaaactttggagaagaaaatatcaacttatcacaaccctctttttatattctaaattcatatacctgtttggtacttaaaggaaaaatatgctgaggaacaggctggtcataagactgtatagaacgtgcatcttccatcctattgaggtgactcctagacaatgggaaaaatgccttcactcgacttgctcattaaatgtgaccgtagctgctaatcttttggcgctgtctcgaactttaattagatgtgctcttctcttgaaggttggaactacagtatccagagaccatagaatcacagagttgaaaacaaaatcttggaaatcattgaatccacttatcagatgagaaaaaaaaaataagcccatggagatagccattttaaaacatatcattctatttagcctccaatgtaaaacaatgagttactatgtttcaataatgttgatgttaagaaattatttgatagcttcctcacttggtctcctatattcctccaaggttactagttaggaagactgtcattcaaatttggagactacataagaagcagaaaaagcatataaagaggcacatgaaattggaacttttctggtaaaatcttctttcttaaactctcctcaaataagctgttggtggcaggaggtgaaagacagcctccaccctttagcacagtccgtacttgtcagcatttcccaggaagggtgatgtctggaaatgatagagattgtggaagcacattgcattatgggtcaagaatgcgaaggtcaaggagtggagtcttcctttacgaagtagtgttaactgcttggcgtggcattgttgtaaacagaagccaccaggaaggatcatccttaggagggaacctgtagatatgactgaaaacaagagagatccagttttaccactctggaaacataggtaatagaaagcccaaaaggtaccttatcacttgtttgttcctttctgtacaaaaggacttaaatcctttctgagcaagaaagatatttgagaatccaattttgttttaaacttgagcttagcattttggaactattccaaagaccacagaattcacagtcattagcataccacagcagactcttttcaaatattgcaaaccagaacagtctgcttgaaaacctggaaatacgacctagtgggttcaacttgactttttttatttctaacccttacccctaggcaattattgataactcattctggtacctggtatgtatatggactttgttagaagaatttgacaactttctaatcatctgttttttttcttttgcttgatagacatacatttagtagaactttactggattgtattgattataaaccacatttcagttcatatcagtccattttgctgcacaataaacaaccaaaaaaatttaattcagtggctaataacaacaatattgatttattcatggagctgcagtttggtagggtttggccaatcatggctggaaatggtttagctatgcttatctctaggccgtcggttctgttcgggtctataccacatattttcttctgagactcaagctgaagggacatcagctactcggggtatgacagagtagcacaaggcaatgacagaagcacaaacaacacttttcaaaatctctcctcttgtcacatttgtttatagcccattagacaaaacatgtcttgtggccaagcccaaagtcaaggggtaggaaaatactttccacctatgtgaggccatggctggagcgtgaatgtatgatactactagggatgtgaaaggattgaggccaataattcaatcttctattggagacaagctcaacgagttagttaaaatggaaggctaatatttactaactttgcaacccaaggaagagaaagcaggatctctctgacgatgacggaatttcataccctcatctttgaagttatactaaagcttaggaacaaccgtcagataggactgaattgctcccccttccagattcagcatgtgaagtatgcagcatcttattatagcagtagccaaaacagccgttttcttcaatttgggaatacaatgtaggtgtgttaattttcaattaagagttctaaacttattatctgcttggtagctcttccatgtgacagtcattccatctgactcttcatgttggcttttgaactaaattttaaaggaaccgccaaaatttaagggccatgtactttttataacctgtttgtggtctgggtaagaaaataaaaattatacaactgttctttttgaccagccacaagcatgtaatgaaaatgactgttttggctagcagatgtattagaagctttcaaggtgtttaaaaaaaaaaaaaaaaactggagaaaggagccagtgaattgacctcaaacaaaacaagaacaaataaacaaaacacttgtctgcacttccaaggaagggtgatatctagaaaagatagagatgatggaagcaccttgcattatgggtcacaaacgtgaaggtcaaggggtggcgtcttcctttatgaagtagtattaactgcttggcagggcattgttgtaaaaagaatccaccagaagtgaaacaagcagcactaaaagttaaaagatttatgtgtaaacctcatctaaggcaacagaagccatttctataaaatagtataggaccttttattatatatggtcctagagtatattaaaataagtctgtttgggtccatttgcagctcatttgaagatttttataggaaaaacatcctcaaaaatatcatactacagtgccttgatgcttttttctttttataaggtactgccagcccaaatagtaagaaaccgatatgatttttgtccatgtgaggtgtttaattgcttcccaaaatatggttattgtgtagatgtcactaacgaaatatataaagagcagtatttgggaaaatttattttaataccacctttttccttttttaccctaaaagtatttatttttttcgtagcatacactctgtgtctcagtatcattgtttttcataaaaacataaattcttaacagaaaatttcctgcaagctcccctaagcttgaagagacaaaggagatttgtaatgtagctcagccccaatcagggtaaaagaatgcagggctgactttatacttataactcagaaaaaggttatgcttcccgtctcttcacagagctagtctcttaattgattccgaactaggaacatgtacaagtggcccacgatctggaacagactggcggataatggaatattgagaccttgtctatggtcagccatattaacactggataagtctgataacactgtgattacatatgtatcaatatagtatgctgttaatatattaaaaacttatttacaacatgattattggacaactgttacagtacagccacatcaatcctatatcaagttagaccatgtcaactggttttgtgttgagacacctgtgtatggacatagtctgaacttttcatagtttgtgctaaatgatagcaatcaacatcggtatggcacttacagtttactgataactttcatgcccattaacatagtaccgcaataactctgtgaagtgctgaatttgtgtcctgtttcatgattgtatttgtgttgatatctcagtcagtcagagtcccaacaagaaacagatggcacattcagattagggtaagttgaggagtctttatttacaaggcactacatactcaggattgggcagggtgtagggaaatctcacaagatagcacaagactctaggactagcagcagcagagctgtcacctctcctagacctgaagccgttgttggggagagaggtttctcagagcccagaaaaaaagaaaaaaaaaaaaaacatcatgcagattttaatgccttgggaggagcagtggctttctcttaaggacagaatttgcctcgaaatgatactcagggaaaaagagatgaagggaatcaatactctgacccaagactctcccttctctgcagtggtttgctagtcctctccttggtcaaacccaaacagaaaaccatagggcataggagtctaatgatgtaatccaagtcagccccctggaaggtggaaaaagaagggaaaatggatctggatctggagggataccaaaaaaaaaaaaaaaaaaaaaaaaccatagttggcatgcttgtttattgatattttcttgcatgatataagaatccagataaatatagtaagaggtctattttactaacaattttaggcacctaataataatactccttctttgaatgtataacctctagaattggttcagaaatgtaactgtgccgttacaatttctattagtattcaacagtagattcatatccattcatctatgactggagtatctgccatttgctggttagttactgtgtaaggtactttgtaaggtatagaaatacacttggggtgcgatggctcatgcctgtaatcccaaggatttgggaagctgaggcaggcagatcacttgagtccaggagtttgagatcagcctgggcaacatggtgaaaccccatctctacaaaaaatgcaaaaagagtacctgcgcatggtggcatgtgcctgtagtcccagctactcgggagcctgaggtagaaggatcacgtgaacccaggaagtcgaggctgcagtgagccataatggcacaactgcactccagcctggatgacagagtgagaccctatcaaaaaaaaataagaaataaatttgagctcagtgacctacattctagtgcagaaaaaaatgaccatagttgattatgagattttaaagcaataaaccacatgagacatactaatgagctcataagatcattcagaaattgtttattatgaacacatagtactttcagtgtggcattaaacagagatcactgtccttaaacaagttaaaagcagaatcaaatcatctgcaaattaacacaccactaaactttaagcttcttgagtgattctgtaatttttaaaatgtcttcagcatttcagtgtcaagatagtgcaaactcagtaaaagcttgtggaattgcattaaacaaaaccaaaataaatagattttattaaaactatatacaattgtctttctaatcatatcctctccatgaatagggaagaaataattttaggaatttaaatatcttctatcttaatagttcctcttatttccctcttaagcaatgttcactccttcaaaaatatttattgagcatctaatatgtacttaacactgtgccaggtgctgtgaagaatgccaaggaaatagaatgaacttctaattctttggagttccaattaaataacctaaagttaaattggtttcggagagaacattatgccttcgagactgtaggcttctcttgattagaaagtcttaaacattttaagtaactaaacagattaaggagaattcaaggatgcctctcactagtaaatttggattagtctggcaaacttcagaccttaaatgcaagatttttaataattaaaagaagagagaaaatgataattacatttctagagtctatgtttaccattcagccttcttaatcatttcctaagtatatctggtgatcaggattttataactccagaaaatctttctatacatcgcataaatctcttcttttaaaaagctcttcaattttgtattttgttaaaacttaaaagcctccatgaaaaatgagacaaaagtcagtgagaggctgtagcaataaaaatcagatgtgattttcttttgaataacatctgtttttacagtcctttcatgttaaactttataagaatttattataaacagctttattgacagttcaatcctatttctaaaaggatttattttcccccaatggtaagagttttcttttcttaaacctaactagttgcagatatttcagatactacatttctcattgtgtaaggtaaagtttctgaccacctgaatatgacttgtagctcctgagaacaatttgtttagtaccgatatcatgcagtgacattggtacaaaggaattttctttatttcactgtactgttttcagttttattctatagttgttaaataagaccattaaatatttttattagtcttatttcctgtttaactaggtgggtttttgatctctgttcagtaaagcattgtgctcttcagagcaagcaattgaaaagcaaatagtgagtatttctactgtaaaagtttaacattaaaagatatacacacagccaggcaaggtggctcacgactgtaatcccagcaatttgggaggctaaggcaggagaatcgcttgagcccaggagttcgagaccagtctgggaaccatagcaagactccgtctctaccaaaaaaattttttaaaaaatagttggatgtggtggaacacctctgtaatcccagctactcaggacgctgaggcaggaggattgcttgagcctgggaggtcaaggctgcaaggctgcagggagctgtgactatgctactgtactccagtctaggtgacagaatgagaccctctctctctcaattaaaaaaaaaaaaacaagatacacacacatatatttgcgtaggtaactctaatttcatttcaagtatgttatgtaacaaccatttgtgtagtgcttgtaacagtcaatatgtaaatactgactcatcttctttgacaattctacctagatacttattagagtcccccttagtcattgaaaggaaggttaaaatcaaaagacgttgtttgccaaagtaatgaaagaaaacttataaacacaatgtatcatgtctggggctgaactaaaacccttctgatatgtggtattaacagatcatctttcatgacagtaccagttattagaaataaaatgattggagttattattaatactaacaatagtggtattcttaaaatgacttccttatttatcttcacctttatacattctactactgcttcaagacccatcttgaattcttcttccacagaacattctgcattaatttcagccaacattgatttctctttttaaaatttgtcttgcacagtgaattagaaaaccaggaattggaaaaccagaaaagcttattaagtaagaagcagagaggagagagtttcaacaaagggccattctaaagtggtctactgcggacaccatactgattatagttggtgattaaatcttatctttccaactgattataaactcctccagggcatactcttatattccacaagatgcttatctgggtgcagagcatgcatgcagttggtatttgctgatttatcaactaactaaatcttaacatattattattaacaatttaaaataaagttaaatgtatcactctccacccctcaaagccatttctgttctttgttttcatagcaccattattatttcctgcatagtattttttaaaaaccgtatttttaaaatttatatatttgtttatttgggtatacttcactagattgtaagcgtcacaaaagcagaactattataaccccagccactaacacaatgcctaacaaatagtaggttctcaatatttgttgaatgaatgacctacagatattacttcattatgaaagattttgctaagttgttttacatctattttatccaaaactaaagttcttgaggcaaagcctagaatatcttctatgttctcacaatgctctgaatcagtgcttctcttaatatgcatagcaattgcctggagagcttgttaaaacatagattacttagccccaaccccagagatgctgattcagtaggtcccaggtgatgctgctgctgtcagtctctggcgcacactttgagtagtagggctctaggatgttatatgtacagacacatgctgaatagtgggctatgtgcttacttgctggctaaataataaatgttctcactgagtcatagaactttgaaatttgcaaggacttttgctattatctagtctatggatagcaaataacctgataccgtgctatagtgcttgactgcatttaacctgcagaatcctcatgagcagcccagcaccatcactccaagtgaaactactctcttcttgaggttgtccaattctatcaattaaagatgaaaaccaggttctgagagttgaaatctctggacttcaaaggtccaacagcccaggtcttctcaattctcgttagtgtttcagcagctgaatacaaatttattaagctgtatcagagtagtatctgtcaaattggagtgtccataatatgcttaaacagagaactccattccaataacatgaactttccttatgctttattcatcatcgcttgaaattttgaattttgcccaaagaagtttataccagtacatgttaaattacatcatagccttctttgtataaatcttagagtagtttactgaagtacatcgcaaagttttgttgtttcttaggtgattttaattatgtatgtttactttcagtaatgcatcttttctccttcatcaatattatgttatgctagctgtaagtacaaaataattgagaacaaattatgacaaattgaaccaagccacaaaaaaaggagaaaccaaatacttttgtgatttgagcttttttcagtccttgaaactttaagaatatctgtctttattaacttttgctttttgctgatggtttctctcattttattatagcttatagcattgtaaattaatttaacatgaaaggataaaaacgttgcttttgaaatgtttctcattaaattatgaaaaaatattacactaaataaaagaaaggaatgcctctggtaccagcttctgtttgctcaattattgcagtacccaaagtgaattattacacagttaactcagaggcaatattattgtcattatattataaaatagatgagttgcaatcttcaaaaaaaaaaaacagcataggtcctttgaaagtgaaataccttttttccttgtgcttcatttaaatatatactgaccccagttttgtttttgtttttcctttttagagttcttgctaatgatgggcccaaagttatattaagaactgcaaagtaaatttcaaccaattactttattcaggggagtcattaaattgaggtacctctgaaattttggaaggaatgtactgccaattagccgaaagcactactcaatgtcctttctatggttataatctctctagtgtatttttaattgaagacaacctctatagaggaggtgagaagttgctatttattggtacttgttaggatggaatcaagggtgtggaagatattcatctatttctctctccagctcccccacacaaaaagaatggtgcttaatccatctgaagcatttggggagcgagggtaaagatgtaatatttaccatgagccgaaacagatcttcagaagtggaaaatggaagcatattgaagtccctcaactaaacagactttcttccatatggaattcaatgcattaatgttttcaaattctatagcttcaaattcttaatattttcaaattatgtgagcttatgtcaaaacatttaagtgagcttttaacaatgaggcaaatatttgaatcatttgtctacataacaaatactactataaagcatattaaatgttataaaaatcctaatatactaatgtaagctattataaagtacaaataattaaacaatatttatatgatcaatgttttataatacgataaacacattaaataattaaaaactcttccaccgtgcaaaaatgactaaataaattgttaatttctaaggctttttgagattactgtgaaagggggtatagtttcaggaaaggtgaaacttcccttcaatgtgtaaaccattaaagaacataataacctactgagtgtgggtctcaatgatatgccctggaaagtatgggcaactactccacacccaattttgtctttatatgataaggcacagcaaataattataatgcaatggataaatggtaaatcccaccaaagattaaccaatcagagcaggatgaaaattctgagtttggaaatctattggaagatttacagattagattaaagtgcccagtaaccaaactatcaaaattatatggcttcagttaattaatgatttccaaggtttttagtatactgtattacaaaacacattaagcatcttaagcattcaaacaacatttttttgatgattcagaaagcatcacaaattgttatatcagctgataataacttaggtacatatcaattaaacttgtattatagacacgcagaattcttcagaccagaagtcgaaagggcttctctagtttgtttatgctaagttgtttagagatgacataactctgagctaatttgtctattgcaatggttctcaaaatggggggcgggggatatttttacctccaccaagtggacatttagcaatatctggaggcatttttaattattattactggattggagatacaactgaagtctagtgggtagaggccagatatggtataaaatatcctacaatgcataggatagccctccacaaggaattatttaggccaaaatgtcagtagtataaaaattgagaaatgctagtctaatatagtgtttactcacctttcctgaaactatgtcccctttcacagtaatctcaaaaagctttagaaattaaaaaatcgtttagtcatttttgcatggtggaagagcttttaattatttagtgtgttttatcttatgaaatgttgataatataaatattgtttaattatttgaactttataagagcttatattagtatattaattaggattttatttaacatttaatatgctttacaataatattcattatatagacaaacgttttatttttttcactttaacaatgatttttaactctaattacataagaaaaagtatgagttaacaattttttaaattacatgcttggtttgagggccaaatacacatgaaaatgtggactaaaatttaaaatcaaataaaatctataaagtcgaggaaaaagctacttttatgacgaggcatggggaattcttcatagtttttgggttttatcagaagttagctattttttttctttttgctctgtaaacaatcagataagagaggctcaaatgacattttcaagtacatcttaacaaaatacactttgagcatcaattgagtaaagtttcattcttttgaaactttggttttcacaagatttcctgagagttttattttattggtgttctgtgggacttgggcatcataattcttacaaactactcagctcaatctaatgtgcagcgaagctctgggaacttttgttttgtctagtatccagttggaagattctatagctacagagcttgggtttaaaccccctccaagtctttaccagctacctttatgaccctggcaaattacttaaactgtgtgccaccattttctcctctgtaatacggaggcaataaaaatttccacttttagattttctatatgcggtttacaaattgacttactctgaagatcatctggagtaaaatctggagaaatatgatcccttataacttcttcaaccctttatatatttcaacatgagtaaccaatgctctaaatatggatataaattataagaataaaaaatctaggactattataatggtctaaactctcttcatagctaaaagtgttgagtaattaaaccagttgagcagctaaatcatgtacacacttctttgatccctcccacgatcatgtatttggcattgtaatgaaaagatatgtttattttcgagaatagacataactacctttaataatatgatcacccagaaatttttacaaacccctggaaaatttcatgaatatcaggctgtgctcataaaaccttagagatgagatcacaatagactgggtcaacatatagtaatgagcaggattaataaaacctcagatgggcatttacaaatgagtcaaaaccatgagtataattaaataattgtagcaaaaaaagagccttgggtaatcctttcagcaaacgtaatcgaagtgattgcatttagaagacaaatatttaatttggtgactagaaggtcttttattattccattatgtctttgtgtgtgtgtgtgtgtgagacacttttcaaggtcaatttttacttataaattgtctctaattaaaaattgacttggttattaaatcattgaaaattggccatcatcaaattcctcattaaaatatttctatgtgccatatatatatatatatatatatagaatatatatgtagaatatatgtatacatttatttttactttttttttactgtgcctactagagaaatttaaactacatatatgtagaatatatgtatgttttaactagacatactgttaagtacactatacctaatatttggcaatattaataccatctcattgagaaacctggaatatatgcacattttggatgtctattatatgttgggcactggactagtcattgataatacagagattagtaagactcaggttgacttcagccatgttgtcaggaagcacacactctagtttgggacagcgaggagaaattcaataagagaaatatatataaggcataatgctctaggagaatatgcagtggataactgcccaataggaccaggcaaggctttttagaggaggaggtggcatttgagtcaagtgttaaaggctgaatggaaattcactggttgagataaactccttaggaggaactactttaatagaacttgccgttagtcctgaaataaatggtgtgcaaaatcattaccatctgtcaattcactcagtctactttgctcttaacttcagaaaaaaatcagaaatacaattaaaacatttgagcctattttactgtcttttaaaatgagttaattcaaagaggaaattaaatataatgagagagaatctcccccgaggattgggggctggggaaatgctattgattctttgcttgtgtttattttctctcaaaaatacattatgcataaacttgatgatcaaaaattcagattattacatttctaaattggcaatgcaatttattgcatcatacatcaatcacaaaaatgctcatcttgctgactttcataaacttctaaatgaacaaaaatgcaaaaatagtttatactatattacactatagtagatttgttaaactaaaccagaacaatggtccatgaaaaataggcctctgactccaaacgctcacaccacaggatctctctgagatttttgtgtcatttcaagtcagagaaaattgtctaataaattgttggcttgtaacaatgaaaactaagatatctgtggggctattcttgttctcttcattttactacagcagctctgcccagtagaaataaaatgtgagccacatatgtaatttaaatttctctagtaggcacactgaaaaaataaaaataaagaagtgaaattaatttcaacagtatgttgtatataacccaatatacccaaaacattgtcattttaacatgtaattgttacaaaagttattaattagattttttccgttaagtatttaaaatctggtaagttttactcttacagcgcaactcagttcagatcagccacatttcaagtgctcagtagccatatgtgtctagtggttaccatattagaaagtagtttgagagatccacattaaaccaaaaggaaaagaacttccggcccttcactgatgagtcactcttcactgctaaccttggaagcattcccaaatgtagtctacagagtttaaatagtctatcttaacatctctcagggcttcagtcttaatgccatagtatttttaaagaatggtggatattcttttttacagaacactctgtaagagcaattagaagtttatgatgcacgtaatgcaaaatacaggtcatttcccaagcctattttaaaagcgcaaaaactgtagtcatttatcacccctgagaatgttgtcttaaatgtcttggtttggatattggtgatgtgagaactttgtgataagaaagtagtctttaagaataagatatcagactaaaattcatatctagaatgaaagtcttgtttttaatggaagattaagagcaagtctgattcagatcatgcatggggtacactagtctaggaaaacactagtctgaaaatatactaaaagttacttcgcaacttaacaagaaaatgtcttgtgggtgatgtcgttcttgatttttaggcaaacctacctacctttgcaaagcagctgggacctttttgcattggaagaatcatttggagcacaaacaaaattagattatcaacactttggaaaacaactacgaatgagcaatcagaaacctgaccttaagattacttgtgaattgtgaatcagcaaaataaactcgattgttcattgctaagtgtatttcaattatcaagggccttctagattataagtagtcttttttttttacttagtttacaattaagatgtgtggtatttgaaatacatttgccacagggagaaatataaattataattaatttcctaggctaattcaatttatgacatacctatatacattatctgtcatctataatttttcccttattgtttacttcccactggaagaatgaaaatggaatattattacatggcacatggcttgatacttttacaaactctgacaattatgtatttattttgggaggcattgagtttatttgttttatttatataaatttatgaggtacaagtataattttgttacatgcatagattgtgtaatggtcacgtcaggccttttagggtatccatcaccttaataagatgcattgtacccattaagtaatttctcactctcataaaattctaattatgtgaatttaatttaatctatttaatgtgttttaggcaaatatagccggtactataaacagttgattttaagatatcattgcttacattgagactaagtaaaacaaaatgggtcaataaatgtcaatctagataacaatgtcaactaaataagaggtcaaacatggcagtatttttgaaggtgatctgtgaaagtgattatagcgtttacactcatggaaaatgccttcagagtttcaactaagaatgccaacagctcattcctttatcctgatgcatattgtcttccttctcacccccagttccttcttcccctaacccctacccgctttcctttgctgattttgacagaaataggacccccaataagtcagggagatagcaggaaatgggataggatagaacccggaatgatagaatagctgagcctgaaggcatgaagaaaggctcctcctgacatctaaatggagacctaagagatgggttggtcaggtagggggaaggaaacatgaggagtattctctaagccaggcaacatactgtgcacaagtctgaagtcatgggaaagtgattttgagaggattgctgcttggtaaacctagagtttgaattgggagagatgaagctagaaagttagtaagggtcagattttttttttttttacttgcatgacaatggtaaaaaccactaaaggttctgtgttaagcagaggagtgacttcatttaaaaaggtaaattggattgaaatgaagggcataaactgaggcaaaaatatccttcgttaagttattgaagcccagttgaacacactggtggcttaaactggagtattggtataagtgggggaaagaggttaatagattccaagttgaaaaaaaaaaaaaaaaacatagactttgctatctagtaatggattaatatacaaaaggaaaaagtaaagtttctactttttggacagctagaaaccttcaccgaagtagggaacccaagacttagattatgttgggaggggcagggtattttagttgcacagggatttgctttacagaaatgactgaatgacaatatagagagatcaattccattaaaagaagtttgattactcacagttctcaagggaagagtacatactacgccatgcaaagccatgcaggaaaaaagttccagagtcggtcagcaggcagaaaaggaaagcacagcccaaaccctttattgtggtttccaaggaaaagaaatgagtgaggtagaataggcaagtctgagcaagtttaggactggatagttcaaataatttccaaaatttcctggctgtaaaagtggtctctggttgtctggtaccaagccctagggtgaggggaaaaagttagggtgggggaaatattggtttggtgtaacaacagttagatgaagaaggtagttggggatacggactttggattagttggtttgtataacgaaaagcaatccaacaaatccacaagggagcaagtttacaagttatttgctatctttaggaattagctagccctgggaggggcagtctctccctggccttccaaggacctcaagatgttcaagcatccataaaatatggaaattttttaaaaacattataaatacacagagtaaacgctgggcatgatataggacagtggttctcaaactttagctccactggaatctcctggaaaacttgttaatatgcagatgaccgttttacccttaagcttctaattggggaggtctggggagggcacagataatttgcatttctacaaagttcttccatgattttgatgccgctggtgagggaccaggctttgagaacactgatttaggacgtgtcctgtttagggaatatccaaaaggcggacaagttcagggaatattcttgggcagttggctgtgtgagtctgaaattcaggatagaatattaagctgaaataaagatttgggagcttatctacagtcaaatgataattgaaatactgagagtacggggggagagaggtccatgtaccaagaaaagtgaaaatgactaatcccaagcctcgctgaccattgagaatggagctaagtgagaggagttaacaaagctgacccagaaaaagtcataagggccttaggaggccaaggaaaaaaaatacattcactgccaacgagaggcacttacgaatggcttgactggctttgccagcatgcatgaactgcttcataattatttgtattgattacagtaacagatacatattttaacaagcaacttaagtaatacaactgatttttaattatcttgtttaaattgataaaggttgtatatattcatggtgtacaacatgatgttttgatatacccatacattgtggaatggctaaatcaagccaattatcgtatgcattacctcacatacactttatttgtggtgagaacacttagagtatactcttagcaagtatcaagtatataatacattgctgttaactatagtatccatgttgtacaataggtctcttgaacatactcctcctgtctaattgaaattgtgtttccttcgaacaactgatttttttaaataaaaaacttaatacctgtaagttagaattcttaatggtcaccttaggagcctatacaattattcctacgttgttgttactattctgtgtctttttcttttttaacatctttaaaggtatcaaatttttatattttgaaagtagaatttattttttgtcagtctaaaatatttttatgttgaacaaaatgcatgaatggtaaacctagatgcaatcaatttttcaaataaaaaaagtagatacccatgaacatttcttttgtaattgcaaactgtcttgaaaggcagtttcaaaaagagtttagttcctaaattgtaccattactcactgcgttaaaatgcaacattcatttgagcgtataaccttttgatcaatttgtttttgatgtcttgttccctgagagttgtctcaaatagatacatataaatatacacatatctcagattggctctgagaaatgtcttgattcaaacgttcttgattctaagattcatggtacataggaactgtatggtgacaaccttgtcagcctatctttagagtagctttggattctattcagaacatttcccaaagctattctgctatcaagaatataaacaggaatagtcaagggaagctttttaaagggcaacattttcatgtaggcatttttctcacattgaaaactagtttactaaatgcagtgtattaccttctcattacaagaagtctttcacattagtataaatgcatatggcagttgtgccagaaataaattgcctctcaaactagcacatggaaagaagaattctgagatttagcacatatgtagcttttaaatagtatactctgtttcaaacattatgtgttagtccacgttctcttcagccattttcagttgcatttttactttatattcctttgtatatttatctttgctaatcattgtcctgagattcctttagctcttgaattctacgtttttaattaatagaaaactttctttttatttttcccccgacatagttgttttctagaaagaaacagttataggttataaatccaacactttagggccgacttgaacatgcatcaaagctactagaggacttgtagaaatacagattgaatggtcccatgcctagagttttacattcagttacagatagggtaggacctgagaattcacattgctcacaaatttccagttgattttgatggcattggtctagagaccaaaccctgagaaccattaaaaaacaaacaaacaaaaacaaacaaaccaaaaaaaaaactatatacagagattttcttcattggcttttgccactgaagacatttagatgaagagactccacaaagtgtaatcatttagttatgagaggggcctgataatttgcatttctatcaaattcccaggggatactattgttgctgattgagaaccacacttggtgaaacactaattaaaataccattaaaaagcaaaaacaatttaggccagcaaaacctcctaaagaatgaggcctaaagacttattttgttttatttttgccagaagcttcttatgggcaaaattatcaccaacagagctgaggttcaaacttgtgttcatagcaagcaaaagggataatttggaaaaaaagctgaggttagctttgtggttggtttgggagtgggaatgagtagggaggaagaaatttaaaaaaaaaaaaaaaaggaagaagccaaatattaaattgttcacagggcgaaaaaagagaaaaggagtaactagaaatatcttagactggttcggcaagtcgggtccctcgcagctaacagtggtcccaccctctggagtttatatgtttacattctttttttttttttttttttttttgagacagggtctcactctgttgcctaggctggagtgcaatggtatgatcacagctcactgcaacctccacctcctgggctcgggtgatccccccaacctcagcctcccaagtagcagagactacaggcaagtgccaccatgtccagctaattttttgtatttttttgcagagatggggtttcaccagttgcctaggctggtctcaatctcctaggctcaagtgatctgcccacctcagcctcccaaagtgctgggattacaggtgtgagccaccgcgcctcattggagtttgcattctagttgggaaaatagccaataaatttgtgacttattttcctttaaaaaaaaaacttattctggctattgtgtgactataggatatggaaggtgcaagagtatgaggctaacaccctgttctaaattccgtctcctctgagccttgttctgtcaagaatctcctccttctatactttttaagtcaccttcctactgatcctttgctgtcagcttaccactctggtacccttcattttaacaaacaaacaattgtccaagcttaccggtgctgctccttcacccctccacctgtacctagtgtcaattctctccctcttctgatggccaaactttgtgaaactgtagcacagctccatatgtgttcctgcaaaggacatgatctcattcctttttatggctgcagagtattccacagtgtatatgtaccacattttctttatccagtctatcactgatgggcatttgggttgattccatgtctttgctattgtgaatagtgctgcagtgaacatacgtgtgcatgtatctttaaaatagaatggtttatattcctttgggtatataaccaataatgggattgctgggtcaaatggtatttctggttctagatctttgaggagctggaagccattatcctcagcaaactaacacaggaacagaaaagcaaatatcacatgttctcacttaaaagtgggagctgaacaatgagaacacatggactcatggaggggaacaacacacactgaggcctgtcggggggtggggcgaggggagggagagcattgggaaaaatagctaatgcatgctgggcttaatatctaggtgatgggcaatagcaaagacttggaaccaacccaaatgtccaacaatgatagactggattgagaaaatgtggcacatatacaccatggaatactatgcagccataaaaaaggatgagttcatgtcctttgtagggacatggatgaagctggaaaccatcattctcagcaaactatggcaaggacaaaaaaccaaacaccacatgttctcactcacaggtgggaattgaacaatgagaacacatggacacaggaaggggaacatcacacaccagggcctgttgtggggtcgggggaggggggagggatagcatttggagatacacctaatgttaactgacgagttactgggtgcagcacaccaacatggcacatgtatacatatgtaactaaccttcacgttgtgcatatggaccctaaaacttaaagtataataataaaatatatatatatatatctctaggtgatgggttaataggtgcagcaaaccaccatggcacatgtttacctatgtaacaaacctgcacatcctgcacatgtaccacggaacttaaaataaaaattaatcatagaactttaaaaaaagaaaagaaaatgtagcagagctgcctagctcaccttctttacccacagctcacttttcagtccatttatctggctattactcctaccgtgccaggcaaactgctctcactaagaaaatcaatagcctaccccctgccaaattgcctgactcagcttctccttgtaattttctcctttagttctctaacaccctcttccccaggttttcacctgacctgtctccataggacatttgagtctctttcctgatgattcatcctcagcctcttccataataagtatggctgctccccagatcctaccctcagcacttcttcactttccatgccacatctcttctgtgatctcatcttcatccacggctctaattagtatctataagcagatgactctcaaagcatatgctgcctatgtacccctcttggccattctacattgacatctgcaactccccagtgaacttctatatttagaccacaggactggtacctgctgataagcacaggtagggtgtactgagtagtgttttctctatttggttgggcttttgctaaagcagttgtcaaatattttgagtcttactcatggccacagacattttaacattagcatgtcccaaactgaaatcccctactgcctctattctctatttcagaagatggcaccaccatctacccaattatttaagctagaaacttctgattctggtgagacttctctcttttatgcatatgtctacactgacacaaaagactgcaaattttacctcctaagtctgtcttaaagcagatttttctctatgattctctatggtttcaggcccttatcactgtgaagtcaagcatacctgattcgaatcttgtcaccgttggcaaatttttaaatctcttctagcctcagtttcctcataaagttttctgtttcttagggtgactaaagggcttaaatgagattaccatacagagagtaaggtacataaaatgcaattaataaagaatagtcactataactgctgatgatgatgctattactattcgtatcctagaaaactccggtaacttgttcactggtctttctgcatctagcatcacttcctcagccagagttatcttctgacatgaaggctgatgccgtcacccccatactcatgtttgaaattcttcaatacctttaagataaattcccacctccttggtgtagcatgcaaggtcacacatgacataatctctccaaggccccatttcttccactctccttgagtgatatatgtggcagaaaatttaaggctgcctggatattatccaccttacgtcccaatacttccatctgccgcaaagaccttctacccaacttcccatcctcaacgaattcttattctttctttaaaaataacctcaaacttcagactagacctctggtccatagggcattacaaatctctcagtaagttgtacaggatgaacacgccccctaaaactttgtttcagatatttcaatttttattttattttattattattatactttaagttttagggtacatgtgcacaatgtgcaggttagttacatatgtatacatgtgccagatatttcagtgttaaaggtttaataatcacatttacagaaaaggaattagctacaaaatggtggcactggtatacaagtatgtaaagatacagtgcttacaatttaggattattgttgtcgatgttttaatattaaaatggctaatcatacagcaaagtcgaaagaaatttacggtcaacatctgtatacccagcacctatactttgccattgaaattttactatacttgatttattacatattcatctatccatccctctttctgtgatcaatttttaatattctaatactcttacccttaaataataagttatcttttcaaaaaataatgtgtttttacatagatgaagcaaaataaacttgcccttgataaaacaatatgcactgtagtgccttctaattcagtgcattgaagtatccattaacaatataaccagagaatataaaacatgtttattaatattccactgtacctgattagatatagaccattaggaagagttattataattaagaatctaggtttgtcaatatagaaaaaaacctgtgttttttatcccactggaatgtcttgtgaggaatattgttcccctttttctaaaatttaactttgacctttattttgttaatgcaccatgggttaagccacactacgacatgtgctaaatagacctggaagttttcaaactaggtttttaaagtgtatttgacattaaatcttcataacaccttattgattaatttaaatccattaccatggtaaggaaaattcgcagacaggcaggtgaaaattaaaatagaaacaaaacaacatggtaagcaatccttccccccaagccaatcagcatgtagtcagtgtgtccttttaaattagcaaggcgcagcttcccataaagtcccagcttgattttatatgctgcaatagtattgctaaaataaaggagaaggcaacttttctctataatttttttctagaagttttcacgcagcttagtatactgcaatgaccacattactcagttccagaattagcagcattccattgtgaatgacttaattcacattgtgattactcatttaacaacattcttgagggtttacaatgtgcaaagcattacattaagtcgtgtgtggcagaggttctcaaatgcagatgatctgtgaagaagatttcctcaataagcagagaaatgagaactataaggacagaaagagagagagagagaaagagaaattatttaagcttgtagcttgtcatcctcctttcttaggacagcctaccatttaggctgagactatgtctttctgattatttcttgtggttgaaataccccttccttaacaatatgatggtaacagtggatggtaaatcttgttttgttttaatagtttacctggcaaaagtatcattttatgtctgtatcagttatatataatagtatatcagtccattaccaaaccgcctcaaaactcagtagcttaaaacagtaggtacttcttgagttcactaatttgtgggctgatggtttacattgggtagtttatctgctctgactgggctcccttgggaatctggagggtagctgagagcttaagtgtctgaaagtggctgggtcaacacagctctatcgctcacatcttgaacatccctccagcaggctaaccagcccgagcaagtcctttttgtgaaggctgaggtgaagagtggaagtgcaaacatgtaaacaatttgttgagcccctgcttccattaagcctgcaatatccgattggctaaagcaagttttatttccccctgtggtaggcagaatcatgggcccctcgaagatgttaatccccagaacctgtgaatatgctgtgctccctggcagtagggaattaatattccagacggaattaaggttgctaagcaggtgactttgagatggggagattttatggactattcagatgggcctaatctaaccacagggttcatataagtgaaaatggaagcaggagagtgggagtcagagagatgaagatagcccctgctggctttgaagatagagaaaggggccattagccaaacaatgttggtagcatctaatgctggaaaaggcagggaaatagattgtcctctaagcttcttcagaaggagtatagccctgccaacactttcattttaatccatgaaacccatttcaaacttctgacttccaaaactataagataatcaatttgtgttgttttaggccagtaagtttatggaaaattgtcacagaagcaataggaaacaaatatacgctccattgttcaatcttttgaataacacatatactattatttacttaatgtttttcttaaaatcagctcattttgttttctgcttttagccttaagtgataattcccacaaaactgtagtctgatgttgcagtgtttttttccttaatacagataaaactaaatgaatattaaaatttaaactataagctgtttatctgtgtaacatggtaaattggctccctaccactactgttcagcaaaccacattttgggaaacagcgatttaggtggttcaaaggagcaagtgattgtgcaagaacaagaatttattagagaaagaagcatttggccaatgggtagaattgttggcagacaaaggtagaagagaaagacaaattattcagtatggctctagcgaactctttgcacttttatcacacaatctgaagcttgctaatcttgacatgtcttaatgttgttggattgctcattaaactggctgaaatgttcacaaagactctcacctgtcttctggcttaagctgagatttatcacacttcttggaaacatcttctggtctccagatctccctcagctaagctatacagtcagtctgttctgtaagaaagcccaaacttctctgcagtgttcctcagtctttttgatatcatgatgaacagattaagttgatgtgttcatcatgatatcaggtaagctggccgaagactctaagctgcctaaccatcccagggctgagagggatcgatatctgaagtacctataacccaatcagggcatgtgccttagcatacccattggaaagccctgttttagagcctttatcagctgtgaacttattgaaggcaatgattttgtcctgttaatcattctattcataattttcaacaagatacgtggttgttgttaataataattgttggttgaaatgaagttaaataaatagcaattgacttttccaaggtgacgcattgcacagatttatttatcttccctttgctgccctggagtaccagttgtatctaccaataagcttcatttataggccagcctcatcttagtttctgaattagtctaagtggctctggtagcgcatcaaaaatcttgctttctgatggtctttgtaatttgaattctgtgacttacagacttggtattcaatatgtcaggaataaacctggggtgtgcccaaatggtttgaaaaatcccagccttcctgatttcctctcttctctttctcccctggccaccctaatagtctgatagtttttgttatttggatactcctaaactcttggcaatttttcttacatctgttctctacaggctgtcacaagtgagtggaggcaggatggcatgggctgcagtggaaagaccaagaaaataagttaaaagccctgggttccagtaaatgctctgtagtgggatttagggcaagtctcttaacttctctcagcatcaatctccgcatctgtgaaataagattaatgacacctgtcttgcctatacttcaaggttgttttgaggttcacatgcattttccaccccatatagcctataaatctctgatgcctacagataacctataatgttctccagtaagtttaatatttccaggattttaaaactcaatgactagcactgctctgatctaacataacatattgtgtcaatatgtgtgggagtctctctggttgatgttaatggaagtttgtatagtttacctaaaatagaataaagctataatattaatatatatcatcgatgtgttttaggtgatttttttcaatataaaggcaattttggttcaaaattaggtagaacatttaatttttactaatttacaaataaaatgataacatcaaaagggccccttcttttaaagataagttgtaactctcacattgatagtaatctgtcatttaggacagggaatccatgtagtttgaaaattcattggcatcatggagctaaaacagtggctttttaaacatgtcgatttcagttttctttgttttacaagtcaagtagtgatattactgggtacatatgaagcatactgattgaccaaaaaatagtaacaaattttgtaaacccttcacttaaccattattcacctttcccagccacataagaatcctttctctttgtccttagattaattgcctttctttaaccttttcaattctaagtccagacaagctgctgtggttctttaaaaggccacacaaaataagtattgtccagtgctaacactctgaaatgtgatattgtaattactaccaagtgaacattaatcactactagattagaatggaattacctgttatattcacattaatagcaaatgagctttccctgattgatgttgttataatgaatacaaaaggaattaatagtgatctggcactcaccaaaagaggggtagtcattaaggacatgccatcaaaaggcgggtaatactttacaaaaaacaagtattaattaaagtaatatcacaacgaatgcctattgaataacttatatccacattacaaagatattatatggttgcgattaatgtgattgcaatacattttgtaaaaattaataatgactaaccctttaaaatatttaggaagcagatatttgtttatatttgctaaatagctatgccaactctttagcttttgtgagtgacttctagcataggaacagtgatggataatatgaagcactatatataataactcatcggccgggcgcggtggctcacgcctgtaatcccagcactttgggaggccgaggcgggcggatcacgaggtcaggagatcgacaccatcctggctaacacggtgaaaccctgtctctactaaaaacacaaaaaattagccgggcgtggtggtgggcgcctgtagtcccactactcaggaggcagagcttgcagtgagccaagattgcaccactgcactccagcctgggtgacagagtgagactctgtcaaaaaaaaacaacctcatatatttttacttgaaaacatacattttgcctttaggatttttacttgttagaatatcctaaaggacctataattgtaaatgtaaaattgactaatttctgggttttaaaaaaaagtatttgaaagctgatctgctgtgaacattgaaccagatgttaagaaaaatgctagtaagaaatgagacttgggagcaaagaagcagaactaaacttttcatatatggtttctatggagtaattgagaacgtacatattaacagggatacaaagtcaggccctctcattcaagatgctttctgtctttaaaaaaaaaaaaaagtaatttttgaaattttctgtggcaacagtcccatagcagaaagcaaagagttttgaattaagtgatcagaatatcattcttataattttactacactgaacattatttagaaaattttgaatgatattaaaaccgctataaaacatacttgcctaccataagacttaggatttaagccagattaaaataaatatttatttagaaggatgtatgtaagaactggtgaaatataaatgaggtctgtatttgagttaatagtattgtgccaatgtcagtttcctagctttgatgataatgtactatgggtatttaaaatgctatcattgggagaagctgggtaaaaggtgcgtgagaagtctctgtactatatttgcaagttttgtggtcttaaaccatttcaaagtaaagttattttagaaaatatctaaatatatattttagaaagtattatctttttctctgtaactagtggctaattagctcagtctgaaagagtatgtagaggtggaactgctaaatatatttctgatctagacttacttgatgatgcttgaattagtaagtgaatgttatgtgccaacatatgctatgatacatataaatatataagattaaatgataggagctaattatttcttggcatgttgcagtgggtccatttaaaactgtttatgtaggaaactactgtaattataaaaatgagcacagcccaacagcccagtatattagttgaaatataaaaggcgttgtgtccaagatttgaaatgccttacaataagcttggcacttacttaccttcacacaaagcagacacattttattgtgattttagtgttccatattatatggtacagtaccaaaggaaaactctaaaatatgtactcaaaatcctgatgtgcccttctttccaaacaggtggcaccacaatgaatataacctttagagttaatatctgaggacaaacccagcagttacaccagcatgatttaggtcctgctgttacaattattattattgtatttatttcacaattaagttgcagagttgagctcgatatagttccagctgtggcttttttttcaactgtctcaatagttcatagatatggccaaatgttcaataatagtgaaagcttatagtccacatattatttctgtagcaccaattttatgtgaaaaaatgatttatctaaatctcagagaatttccataactagttttgttatacatctacaaaactaagttaaaagaacagagcagactttttaaatagctagattggccaaatccacctcattatcatcaagaagatactgaaacaccgtgtttatacaacaagaccaggcattgtaaaagaggaggaaaggtagagacaaaatttatttagccctcaggaatctttcattctgatagtgtaaatttgacaactttagagggacttattaacatgtatcttatatatcttgataccgaatatatattttgtgattgcattagagccatgaaatattacacaggtcatttgaacatagcattttcatagagaaggtgacatttgcaaaagattaggagaaaagtaactacgattagaaaatcgtagttttattttgtctcttgagaatgaattgatgttaattttatgtctgatttggccaaatacgatgtggaatttgctaaagactgaaaaaagaagagacatcaaatagagggttgcaagttaacagaccatgttataattaaatgagggaaaaaaaagtagagttgttaaactcccagagaagtcatttccccttggtttggtgcatttcactttggtggtgaagtaaatgaccatatgggcacttttctagctctgtccgcaggtagcactgggtatttgtggacaaattacctagcttttcatagcactagtttccttgttgatagacttcagaattctaaattccattttacatccttatttctatgtttaacttaaagataatcctttgcagccgggcacagtggctcacacctgtaatcccagcactttgggaggccgaggcaggcggatcacgaggtcaggagatcgagaccatcctggctaacatggtgaaaccccatctctactgaaaatacaaaaaatcagccgggtgttgtggtgggcgcctgtggtcccagctactcaggaggctgaggcaggaggatggcatgaatccgggaggtggagcttgcggtgagccgagatcgagtcactgcactccagcccgggcaacagagccagactctgcctcaaaaaaaaaaaaaaacaaaaaaaaaaacaaacagatcatcctttgcactggaattatcctgcagtggaggatagtaatgaaagtgtagactctgtttctgaacactagctatgtcactttcaaactgtgtgattttccttcaagtttctcaatcactccaggtctggtttctaaatagaggaataggagtagagattaatattgtgaagattaaatgagaaaacttatataaagcacttagtacggtgccctgcatattgtgaaggcttggtatgttgttagtagattcattttattatcattattaataatactgaaccctggctgttgggggaattggttctatcctcctgtctcatagtcaaaataggttaaagggccttctatctcttatttctggtggtgcattataattactaatagtaatgtgcttcatttgtatatgatcctttatagtttacatggcgctgttttatgtaatcttactaaaatttcaaaaataattttaaaaagccagaattcacaagaatgtgactcggagaagaagtagatgtttttctaagtagatctttcagtttaactgattcaaattttctcatgtttcatatacatgattatcatgtcttttgataaacagaatgttaaccagagtacaaccttgtatgaacatatttattcagcttagaaaagatccagaggtacaaaatctagatcccagtgtagaagttagcatacacagtacaatttctagtatgtccataaacaatatgttaaagtattagtttgagccatataggattgccaatatctgagtgttatagagctacaaaattagtaggaaattttgttgctttaacctaatcattaaattagaattgtgtgacttaaagttacaaatggtttccgaatattttgcagtaaaaaagtagtgaggaaaataaatataaatactaaactagacctgggaaatttaaggctataaagaattctagcttacagagagaggagtctttgtttgcaacctcccactagctaaatttaaattatcacaaatttcatcctctcctttacttaacccttgactcatgcaactagtcaaatgtctttttcttgctaattttttctttccatagatcacttatagggagttctggttaaaaatgatgtctctttaaccttcactaaaatgagaataggggaattaaaatgatatttaccacaaagagaaaaaaatctgggaggaaaaacaataaaataaaaaagataaaaaatttaggaatatgcagagaatggaggagttagcatatcttggaaacctgaattccaagtacttagaacttgggaagtcctagaaatgtgaagcaccagctactgcagaaggcagagatgaatgtgaggtaagatagtgagactgtgaagagaaatcattcagtaaaaaatgcattatcaagccaactgccactggtctagtggagtttaatcccactggggaaattctaaatggattgaagacatgtgtttaagagttagttattctttcaaaggggcaagggagctggggtatttatacacaaaatcctgctagtcattggtttaggactgcttccaacgggggaattattttcctagcatttctggcataccaccttggcaagaaaaattattttgtgtccagagtatgtctaaagccattagggaaaaaaaatgtggatcctcatagttgaaagccaggccagtctgcactaaagtggtaaggatgttttcttttagagatacaggtctaagaaagaaatctgaaggtggttacctcttatgcaagaatttaatttgatggattcaaggtgtgttggttaagagaaatggggaagggttgcttctcatgactgcggcacgattctactatactaaatttttcttttattaagcagcattgccttatgcaatgataggaaacatttgttatatgtgaaatcacttttatttttattttttaatctattcctattcttttcatttttttaacttttattttaggtttgtggggtacatgtgaaggtttattacataggcaaaccggtgtcacaggggtccgttttacattttatttcaccaccgaggtattaagccaactactcagtagttatcttttctgctcctctctctcctcccggcatctcttttaaaagaaaataatttttagcaattctttagaataagtcttggccacctaaaggtttccaggactctagttcagggagtatttatctaagtcagtagttcttaacctgatataatttcatccccagagaacatttgacagtatctcaagaaattcttggttgtcacattgggggcggggatactgctgtcatcaagtgggcagaggccagggatgctgctcaacatgttgtaatgcacaagacagccccccacaacaaagaattatttggtccaatatgtcagtagtgccaagtttcagacatcctgctctaaatcaggactgtgatgtgaattctctgcgatgatgaagatattttatatccgtgatgtgcagtactgtagcatatggctactgagcaattgaaatatagctagtgtgactgtacaccaggtgtgatgttccataccgaggaaagaagtagaaataagatatagtctttgaagtcagagctcacaatctagtagcggagacagatttttaaaaattacaatattttaaaaatattgcaatagaacatggtaatgttagaagattaataacatgctaaatttgaggcatcaggactcagacagacaattaaaaattctctgaggtgaatttccacccttagctcagaatactgtaatgtttaaaagctgttttctatacacacacacacacacacacacacacacacacacacacacccctttaaatcttttatcatgtaactcattgcttcttattttacccttttgtcagagaatacatataaaatactggaatctgatgggacattctactttatttaacaatgctattgagtttctcaaaatagtttcctaagaaagtctattaaagtattgattttttcataaaggataatacaaatggcatgagtctgtttaacattttaatcaagcttaaaattagtcttgcatttgaaacaaacttgcccagagaaattgttgagaaacttaagagaaaaacatcataaaaaattgatgggccagccaggctgtgagaatattaaaatccaaatctaaattatggttaaccattgtcacatctttctttgaagcttaagtaactcgatattccctgtaggatacccagtgattcaaagtgacacatatactgtcagctcattttccttcccagcatgctggtacaatttgtatccatagaaatatatggaaaaacctattagtcttgagtgccagaacctaccaaaaggaatctttgtcatctacaaataaattaataacataagataaacaatcctattaagttatactggcccgaaaagggaaaaaagaccagtttatgaattgacaaaagaaggtaaatgagattagccatatagcaaccactcagataataatgtgttttctctgtttagtaaaaaagcatatttgagagaaaattttcccttatagaacaattcttaataatatacatagatactcctttcctgggatgtagagtttaatcctcccctaagcccctccatgaacttggtaacttacttccagataatagaatatggaaaagtaggaataacaatggagaagaaaccaggcaggcaccaagttaactaagtagtcaagtataacatcgccagtgataataatattgatatcatgtctcctgtgatatgatgtcatgaaaaggacatgttatctctctggtattcttccccaaaacctgtaacttcttctaatagggaaaatacttcagtcaaatcttaagagacttctagaatatacctgactagtcctattcaaaagtttcaaggtcatgaagaacaagaagaaactgagagactgtcacagactagaggagaccaaaaagacccaaggaccaaatgcagtaggagattctggattggatcctgaaacagaaaaatgacatgagtggaaaaactggtgaaatctgaataaagtctgtagttttgttaatagtgttgtatcagtgtttgtttaaatgtttagataaatctctcatgcgtacagaagagttatcattaggggaagctgtgtgtcaggcacttagaaaactttcagatacataggtaccttttgtaagtaaaataatgaattaatgggtcattttatgtctgtattttatataaggctacatttctaaagagacaaaattgtgagtcccataaaaatataaaatgaatatgtgtaaaacattttattagatcattaactgatgaaggaattagtaagatgttagttacagttggttcaaaggagagtctgaagaattggcatatatatatacgtatatatacgtatatatacgtatatacatatatatacgtatatacgtatatatacgtatatacatatatgtgtatatatatattttatatatatacacatatatatataaaaaacactctagaatgctgataggaattttataacagatacaatactgatcactaactgtagggcaggaatctattgcgttccatgagaaaattttactggcatctagtgaacaagaatcatttgtgtcaccatcagccctccacaaattgacttttaaacgtacagaattgcaaaatagcataaccaaagtctaaggtacagactcttagataatcagataactcctaaggttttcctaaggaattaaagggaaagagacattctcagattaaggaaaacaaagaatttcttgctagcaaatctgctcttaaagaatgacaaaaagacattctctaaacagaaaggaaattataacgaagtcttgacatttcagaaagaaaatagtagaatgggtaaaaatgagagtaaaataatagactatcctatttaccataagtttgaagtgaaaactttaacaccacctgatgtggttctcaatgtatgtagagaaaatacttaagagttatattttaaaagaagacatacctaagtggaagtaagagtccttctacacgtcacctgaagtcaattccagtagattgcaatgttaatgcgtatcgtaatgcctggaaagaccactaaaaaactatacaaagtgatacgttaagaaaatacaacaaataaattttgatggaatcttaagaaatgttcaaataacccacaagaaggtaagaaaaaagaaagagaagaatgagaaataaagaaaacaaacagaaaccaaataaggtggcagattgaagccctaatatatccataattaccttaaatgcaaatggtctaaatataccaattaaaagagatttagctgagtggattgataaaagctgagcacacaatatgccgtctaaaagaagtttatttcaaatacaacctaggtaggttaaaattaaaagaatcgaaaaagttacattatgcaacaattaatcaaaagaaagcagcagcagtaatgttaatatcagataaagtaggcttcattgcaaagaaaattactagtgacaaacagggacattacataaagattaagtgttaattcactgggaagacataataatcctaaatgtgtttgcacctaacaacagagcttccaaatacatgaagcaaaaatgaatagagctgaaaaaagaaacagacaaatccatatttctagttagggacttcaacactcctctctcttcagttgatagaactactaaatggaaaataagcaagggtaaagagaactgaacaacaccatcaaccaataggatctaattgaagcactcctcccaacagtagcagaatacacattactttaaagctctcatgaaacattcactgatataagccatattctggactccaagcaacttcagcaaatttagagaattcaacttatatgttcccagaacataatgaaaccaagctagaaatcaataagagaaagacaaaagaaaaacctcaaaacacttggaaatgaagcagcacacctttaaatcattttccccaggtcaaggaggaggttgcaaagaaaaattttttaaacacaaagaactaaataaaatgaaaataaaacatcaacatgagtgagattctgaagcaaagggcaagcatatctactgtctatttttaaagattaagcttccttaagctcagggtttctctcctgtgatgcaatccactgtgtgtacaggtgtctcctgaacttctttgggattactctgtgggaactggctcaataaaatgttggttctttgactactgctttgctgtgagtaatctagtctttttctctggcaaaaaaaaataaagtgagatgtcataaaagcagtattgagaataaaatgtatagcattagattatttagttagaagacaggaaaggtctaaaataaataaatgagcctagagacaaaaaccatcaacaaaatattaaataacatgcgtcaaagtttaaaaaaagagtgtcataccataactaactgggatttagtattgaaggctggctcaacatttgaaagttaattagtgtaatctaccatatcaacaaactaaagaagaaaaaatcatatgattatattgattgatgcagaagcatctgacaacacccagcatccattcatgataaaaactatgagaaaactgggaatagaggataacttccacatcttaataaagggtatctacagaaaactacagttaatagcataattttaataatggaaggcttaatgtttccacccatgattgctaattagggaaggatgcccaatttcactactcttttttaacatagttctggaagttccagacactacaataaagcaaggaaaaacaataaagcatgcatattgaaaagtataaaataaaattatttctatttgtggatggcatgactgtgtacgtagaaaatatcaaatattctacaaaaacaaaagcaaaaataaccaaaaatgctcatggagctgagaagagaggttaacaagatccaaaaatacaagatcaacacaccaaagctagtcacatttttatatacagatgctcctcatcttatgatgggcttacatttagataaacccatcataaagtcaaaaaatcataaggcaagccatcacaacttacggattatctatgttggaaatgaagatgtgaaaagtgaaattaaaaacacaacaccatttataattgcttatccaaaaatgaaatacgtaggtataaatctatcatacatgtacaggatcggtatgtagaaaattataaaatgctgatgaaaggcattaaaaacaacctaaataagtggattatatggcatgtttatagactggaagagtcagcatagcaaatatgtcagttcttctcaaatcaatctaaaggtttaatttagtttctatcaaaatcttatcaaggatttctgtacacatagacaagcatactctaaaatctataagaaaagtcacaggccacagaataactaaaacagtcttttaaaaaggtaaataaagtgggagtaacctctctacccaatattatggctaacaatatagtaaggctatcaatacagtatgatgttgctggagggatagactcatagaccaaatgaaacagaatagagaacccaaaaacagacccatgcaaatgtgcccaacagatttttgataaagttgcaaaagcaattcaatagagaaagctcaccttttcaacaaatggtcctgcagaaattggacatccctagagtgggaaaaaaaaagaacttcaacctaaatctcacaccttgtaaaaacttaattcaaaatagatcatggacttaaatgtaaaacataaaactatcaaaatttagggaaaaatgagaaaatcttcaggctctagggctagaattggcattgaaagcatgatccacacacagaaaaaaatcagttggactgcatcaagatttaaaacctttgcactgcaaaagacctgtgagggaggatgaaaagacaagctacagactgatagaaaatattttcaagccatatagccaaaagatggatgtctagaatatataaagaactctcaaaactgcaaggtaaaacaagaaacaaacaatgcaattaggaaatgggcaagacacatcaagaaacgtttcaccaaaaaggatatacagatagcaaataggtgcatgaaaagattatcaaaaacattagccattagagaaatgcaaattaaaattattatatattcctacacatctatcagaatggctaaaacaaagtagttacaacaccagatgctagcaaggatgtggagaaaatggatcattcacatattgctggtggaaatgtaaaatggtacagccactgtagcaaactgtttatcaattttctgtaaaactaaacatgcagctaccatacaacccagcaattgcactcttggacatttatcttacaacctgtacaaaaatattcataccaccattattcattatagccaaaaactggaaagaacccagacggtcaacaatgaatggttgtacaaactacggtacatccatacataccaggcaatactattcagcaataaaatggaatgaaatatttatacatgcaacaacttttagatcaatctccacagaattatgctgagtaaaaacagctcatctgaaaaggttacataatgaatgattctgtttatatagccgtcttgaagtgacagaattaaagaatgaagaacagattggtgattgcaaggagtccgggacaacaggggaaagagagagagagagatggatgtgactccaaaagggcaacacaggaggcatccttgtagtgttggaactgttctttaccttgattgtgtcaatgtcaatatcctggttatgatattgtactatatttttgcaaggttttaccttcagggagacggggtcaggggtatactggttttctctgtattatttctcacaactacatgtgaacatacaattatctcaaaactaaaagtgtaatttcaaaaaacaaataaaacaattcagaaattttaagacttcaacagtcatttatctcatttgttattttactgttgagaaaacaggcacaaagaaactgaagtgacttactttcatgcttcacctaagtctttttttcttttctccatcactcagttaagagcttctgtaatacagaaagtatgtcttgtattcttttaactcccatattacttcaagcaatgttgaacacatgttaacattgtaaaagttgttgtctgagtaaatgggaaagatagaggtctatgtctatatgcaaatactttgtattaacatgtttcagtctgatataactttccacacagaaagtacaaaagaagatctgttcaagttatctgatttaattaagatagtaaaaagaaagctgataatttagggggtcttatttgattgtttttaattttacttattttccactaggtgatcattttgatgattcaaaaatgaaaatttacaaaaaggtataaaataaaaattatttctcctacctctatgcactgtcgaatcaattcccctacccaccaccaatcagtattgtcagctgtttgtatatccttcaggagatatgtacgaatttcaagcgaatatgcataagtttatgttatgtatatgtgtgtgtctgttttctatatatatgcatctttacattaatggtagcatacgatacacattttcttctgaattatgcttctctctcaacaatgtttcttggacattttcctgtatcagtacataaagaatgtatttgtttcctatgactgcaatagtgaaataccacaaactggatgacttaaccaaaagaagtctgttgtcttacagttctggaggatagaagtctgagatcaaggtgtcaggagggttggttccttctgagggctcggaaggagaatctgttccattccattcccctagtttctgatggtttgttggcaatctttggtgctccttgtcctgtagatgtctgccttcattttcacatggcatgccccctgtgtacgtgtctgtctccaacttccccttttaaggacagagtcatattggactcaggcccaaccaaatgacctcattttaagttgattatctctgtaatgaccctatctccaaatagggtcacattctgaggtaccaggggttaggacttcaacatttaaatttggagaaaatttggacagaattcaacccatagcaaagaacttaaccgttagtttaatgactacatattgttccattttgtggatgtatcataatctatttaagcagtgctctgaacattttattggttttcactttcattgttttgccttaatattggtgtctgtttcatagaatagatttatagtattttaggcttatcaagattttatttaaatcttggaatttaaattccctgtaaatttcaagtgccttgaaggcaagatatattgaggaggggagacttttaaagttcatatgaaataataaataatcgcaagtatctcaggaatgcatgaaaaataataaatgtctctgcatcaataataagggagggggcttgccttatccaatattaaacttgctgtaaagctactgtaatccaaatagtatagtattagcacaaaacaagacaagtagatcactgaagcaaaattgagagtccagaagcagatcagattgtttttggaggccgggcatggtggcttacgcctgtaatcccagcactttgggagtctgaggtgggtggattacctgaggagttcaagaccagcctagccaacttggtgaaaccccgtctctactaaaaatacaaaaattagctgggcgtggtggtgggcgcctgtagtcccagctacttgggaggctgaggcaggagaatcgcttgaacccaggaggcggaggttgcagtgagccaagatcgcaccattgtactccagcctgggcaacaagagcgaaactccatctcaaaaaataaataaataaataaataaatagatacaaattgtttttggaaacattatatggcaaatgtgttattttaattcaaggaataaaggtgttttattcaataaatggtgccagcactctttgcaattcctcttagaaaacacagattgcctcctagcttatgcaatgtaagaatacatttcaaatgcattaaagttttaaatgtaaaaacaaaaattcttggaatgaggaagacgttttctaaacaagacacaaaactcaaaagctataaggaaaaaatataccttgttactgcttaaaataacagaagacaaagtcaaaagaaaaacagcaaatagagtagatgtattcgcaacatgtgacataaagagatgcatatacctaatatacaaatttctcctacaaatttgttaattaaattaatattttttaaaattcaaacaacccagtacaaaactggccgaagtataggaatatgcaattcccagaagaggatatccagatagctggaaaaataaaactatgataatatgcttcctcatagtagtaagggataggaaaataaagaaataagacaccatgtctatctaacaaatagacagaaattaagaatgataatttttaatggaagagagcactctcagatattgcagatgaaacgcaaattgctgtggtctttgaggaaagaaatgtggtatgatctacaaaaattttaaatgcacttaccttttgatcagtcactccatttctgagaatcaatactacagaaataaaagtaccagtatgaaaggctgtatgtagaggatgtgtattttggcattgtctatgatggtcaaaaagtagaaatcaagcaaatacccttcagtgtggaaattattgaatatgttatggaattatttgggcatcccagaatgaattattatttagtctagttagagctgtgtctactgtcctgaaagaatggtgatgatatctttcaaaaatcaaaacaagtttcaattaacatattccatttttaaaataaaaaagataaaattaatcttatgggattacataaccatgaaggaggaatggagagatatatactaggttatcagtatttgttaccttggattttcaaaggagaatgaaagaggaacaaataatgtatcaagtttcacaaaaagtgaaaaggtggaatataaatattactgcaaatatataaccattgaatatgtatatggacaaggacgataagataatatagaaaactgaatatgttggttttattatgaggtggttggattgaagatatttttgtctccaaatactgttgttttaatatgttgtgttttacaaagaaacatgggctgagcagacagggaagccctgataagcatagtacctgccatgtggccattcaataaatgatagttattgattattattattagagttgtagtacagtagtgcctaccttaatatatttagattgatgcccagcagcattgagttaacccgcattttaaggacaagtgttatagctattatatactaatggtaaacttgagtctgtaactagcactgttgaaggaggacaacagagtaatatgatgtgtattggcctggggatggaagggtggtgcttaaggcacagcagattttcactccagccaggtttccttaggacctctccaatgaacaggatacctcccttcctgttctttctaccctcccaccccgttttttgctttttcagtttcagcccaaaggggaaggaagtatgatgactgactccccatcagtccctgaggtgaactgggattttgggagagtgtggcagctgcaaatttggcttcctggagataggatttttgccctcaatctggagaaagttcctgaggctacagctgttcaagcttgtgaagtaggaactttgatcccttttttcaaaagttttgtataattagcatccaacttgttagacagtatgtggctcattacaagattgccacaaattcatgctgggccgtgtctaagaacagggcaaagggagcctttggaaagtgttatacagttgaccctcaaacaatgtgagggttaggggcgctgagcccaacacattgaaaaatctaagtagaacttttcactcccccaaaacgtaactactaataggctactgttgacagaagccatactgataacataaagagtgattagcgtatactttgcattgttatatgtaatatatactgtattcttgcaataaagtaagttagagaaaatacgatgttactaagaaaatcataaggaagagaaaaatatatttactattaattaagtggaagtggatcatcatataggtcttcattctcattatcttcacgttaagtaggctgaggaggtggagggagaggaggggttggtcttgctgccaatctaaatgctgggcccagccaatgggtataagttttaagtgtgcacatattggtgaacccttacagatcacggcactgtctgttcgagtgtctattttgaaatgtccctatccgtaatataagttgcaaaggagtttgtgggcccactgaattctaccaccctgatcattgtgaagcccattcagctttgtgaagagcttatcttggtactaccttagccaaggtatgataactcagacataatgtcttttctttcatggttccttttttagtgatcatagattcagttctgtaataattagagatttatgtgtcctattagtaattgcatcattctttaaagacagtgtcaaccttgctatacagtgtgattgaagccttgacataacttgggggtttgttggcattttgaaatcccaggccccacttcaaaactgttgaatcagaatctgcattgtaagaagatccccaaaagatctgcatgcacaagccttgaaagagaagagaagccatctaacattcctcacctaagatttgaagaatttcccacttatgcaagagtaggggtgtgatttctcaggcaggatatctaacagaaaacaacacttatgaagtgtttcctgtaggagctaagcaggtggccagaaaatggcaggctacaaaggagaagaatgactaggaacctgagcaaggagaaagtctcaaagacaaggaagtggctggcagtgtcagggactaccaggcagctgaaaaagctaggtgtgaacactatttcttggagttttcagcaagtaagaggttcatgatgatgcctcaaagaatttacagtggaaccagagccaagaagtcttattgtggtgagttgggaattagggaaagtgttatacagttgaccctcaaacagtgtgagggttcggggcgctgagccctaacctcaagtaagaggttcatgatgatgcaatcaaagaatttacactggaaccagagccaagaagtctttttttttttttttttttttttttgagacggagtttcgctctgtcgcccaggctggagtgcagtggcgcgatctcgactcactgcaagctccgcctcccgggttcacgccattctcctgcctcagcctcccgtgtagctgggactacaggcgcgcgccaccatgcccagctaatttttgtatttttagtagagacggggtttcaccgtgttagccaggatggtctcgatctcctgacctcgtgatccgcccgtctcggcctcccaaagtgctgggattacaggcgtgagccaccgcgcccggcagccaagaagtcttatggtggtgagttgagaagtagggaggtggaaataaggaatggagatgaagacatgaaaggaatttgagaaatgaggcaatagctagagaagaatataggaatacacagatccagcaacccagcaagggaagggctagattctgatttcatgagcaaattgcctactaattaaattcacaatatcagaggaaactgttggactcacttactgaataatagctgaaaagtatctttgctttatagagagatcactgtagatgaaagtcatcttccagtggtgagatattcttcagtgtcatctcttcatttttatttctaatttttcttaatttgaattatttcttctgataatgggaatgatgtggtaattttgtctctcctgtaaattattttaaagatttgtacgaactcctttggcaggcttgagtgtgttgtgacagcttggcttagatatgcattgaatgtcattgaattcaaactccttaccaacatagttagatagcccataggcattctacttgaccctttcaaggagatctggagatgcaattgtaggggaaaaaagaagaaaagaattcaagaagcaacaaagtgaaagataatttggcttgcagaagagaggtctttctatcacagtaataataatgccaattatatgtccatatatatatatacgcacacatatatatagtatatatatatacacatataactcagacataattctttcatagttctttcttttgtgcacagattcacttctgttataattacatacttatgtgacctatttgttagtaattgcttcagtttcttaaaagagcatcaccttgctgtgcaaagtgtgattgaagcctcaacatctcttgggagtttttttagaattttgaaatcccaggccccacttcagaactgttgaatcagaatccgccattgtaagacaatccccaagggatctgcacgcacgttgcagcttgagaagcactgcagtatcacacatatacacacatattcaacaccaaagagagagaaagaggtcataagctctcaggtggagactagttccatgtatatatgcatagagagaagaacaaactctaccttccagcaacgtaaaattctactcaatcatgtattcaccaaaaaagaaaaggctttctccatataatgtgtattattcatatattggcactcttcagagctcttcattccaccctaatgttatctttcttagataattcacatgacactttgttatcttccaataatttctgtcattgttataagcgaaattattcaggctttatctaagagagtaaatcaaacagtatgcctctctcattccaattctgcaatattttcattctagaatgtctaaaggagccttgaaagagaggagaagtcacctaaggccagctagaggggatatatagcagggaatggtggcaactccactcctcgtagcccagtggggttttttttttttccaatctgtatttgtatgtgagtatcacgtctatgccgattttatgtgtacatatgtaactcaaatctgttcattgtgctagttagaatcttatttccccctcttctactacactctaccctttctctttcccctcctttggcaaccaagacactgagttattaataagcagattggagcaaacattttgatgcactattgtttgatagatttgttggttcattcaataagcattaattgagcacttgctaagtgttaaacaatgtactaattgctagatttaaggatgaaaatgataaaacccttggcctctagagcctagagtgtagttggggagacaaatgggcaaattagtcacacgacaacatattccttgttaaaacagacagttgtgcataagtctgtatacccagactggagatgactctgtttccaatgttgccctgggaaacctcatgatcagtttaataatgatgtttggggtgagaggatactgagacagtttgcttctagcatagtaattacccatagaagtttggggtctttattcaaaagagtttacaggccacatgagccactgtcttgccttttataggatcacatctaagttccgtgtcatataatggccttggccttcttggctttctctgtgctctttgcctgccaataccctaattattgaagtactgtctcccgcagctcctcaaccatgagctgttcccgatcctcccagcagctatgtttctcctttcttcaaacctctttagctttttatttgtactttatttgtactaaattgtatttagagctttggagaacattcttcatagttgtaattagactgtaaagtcctgagaatgtatttttcatcttcgtagccccctgcagtatctagcagaatgcctttaaacaaatgggcagtaaataaatcccaacaaacttaaattaaatttctccaaattgcatatttaattttatagtggcatttactgataacatacattgaaataaaggccagagcataatcctctctgtttctgaatattatttatttaaatattaactttctaatccaattaggtctttcaatgacactttagatctaaatttatttttgcattgttttaaatgtcatcaaatgattcatctcttgtgttttttaatatttttggaacgaacgtgtgaaaatgagcaagtgtcatcagaatatgatgcttgggtttttttaattcaacatttctttgatcatatatttaaagactttttctcaattcctttctggatgtggcctcacaaatcatttcagaagtcaatccatttcaagatttttttttttttttttgcttttttcacttcacaggaagtcaagttcattctttaaaatgtagcaaatgattaagcaaattcaacgaatgatcttcatcaactccgaggtgtttttcccccttgaaaaatttaagttactattatttttttttctttttttttttttttgatacagagtctcactctgttacccaggctagagtgcagtggtgtgatctcggctcactgcaagctccacctcctgggttcacgccattctcctgcctcagcctcccgagcagctggtaccacaggcgcctgccaccatgtctggctaattttgtgcatttttagtagagatggggtttctccttgttagccaggatggtctcgatctcctgacctcgtgatccacccacctcggcctcccaaagtgctgggattacaggcgtgagccactgcgcccggccaattattattattttttttaaacttcacctatcataaatcttttaaaatttcacctatgataaacttcctctgtcatctggggaattacttaaatgcaatgatggccttcaagtatactaccaggcagcctatccaaatcatgaaacagaaaggctcatagaccaaattaaaatacttgaatcacagagtttattaaaatcacagtgagaagcaaacgggaaagatatgtgctaagttaacacgcttagaatagagtgtaagcagactgtgaagattagagtacttgaattctgcagtacacaacattatatgtcttgtctgtctctgtattgcatcagccttcccaattatggtgtgcttacaaggaccaaagttgacttcccaacaagggagtccaaaatgggtggtgcctgattcagtggcatgtggtttatcagagacacagagacaagaatgcatggccacagctgtaacttgccaaaatagcctgatgactagccatgtaattctcaggcagaagacttacggtgctggaataggtatcacctatggatgcctgaattaagaccttgtgaacattaagtgctcatgtgtatttatttgatcttgaatatttagtgcctcttgtatatttggtctcatgtgtatttagcatattatgaatatttagtacccaggtgcctcatgaatattgggtatcttttggtccttctatccctcactatctatgtttagtacacacatgctctgcttgctaactacttatcttctaattaacacattccaagagccaattatgtgtatctctttccactgagttcttcattcaatgacatcaagttagttgcttgaaatcagctattgtgagagcacttacaccacagaaattggcaaatgctacaattagcgccactgccctcccctagagccagttatttgacatttactagcattccactacttacatggcccttcatgctctcactccgtgtgaccactcaagccttatccctctttactgaactctacaatcaaataaaatatctttgtttcttgcttctggccctccatcaaatggctccctctcctaggaacaatctgtctctcctctatcacctttgtttagctagttaataatcccttttcagacagcacctcataaatagattcctgaacatcccaaaccggatctcctgcaccttcaatgtgctacttcagtacatttgtcttaccctttgccatatggtatttcaattgcccatgaatttgtattcctgtttagatcttaagctttgtgaggtctttttgtacttttttgtacttccgtatacctaccacataataaatatttaatgaaagcattaatgaataagtaagtgaatggagtgagtgaatgagtattcaattatgattcatttgtatcaaagtgataacatatacttacagggaaaaggccagagggggaaaaaataaaaaataataatatattttatgtatgaccttgtgtggggaaaggaacatagggccactgcctggcctgcttcttttatgcaaatcctaatgtaaaatatgatcaacgcctggctgggcagaaatacaaaaacccagtactagtgattctcccaaccagataccagctagtacagatcatagccagatttaactactgtgaagtggttaggttagaggtgacctataaggaaatgacgctaatgatcattagcatcatcttggaagcttaaaaaaatgccccagctgtaccccaagccaatgatatcagacttttgtggggaacccagatatcattgtttttaatctttaatgattccaatttagccaaagttgagtctcaacaaaccaagttcttcttactctcatattctcttcttctcgcatagataagaattaacagccagctcttctacatgtttcttagacacatatattgtttcagtggtaattcgttaacagtgcatatgtcagcaaagcatgactgaaaaaaatatctgctcccacacattctgatcccatcttgacactgcatagctgttggcgaaggcaatttcaacaatgaagaagtgggagaaatgactacattttatgtaaatatgtattcattgaaaatcaaaaggacatatgtaatgatattgtttaagattctaaatgaaggacaatacttaagagtcctctgtagtcaaatttctcagcagtaaaaaaacattgtcttttctttacaactattaaccatatggctgtgaaaatgttattctacaagcctttaagatttgaaatctgactttatgttaatacacagaatttaccacacaatcctgtatgatttctaagtagatttaaagagtagctattgctcaccttttcaacataatggtaatgatggtgcaatgtcaattacatgatactctcatgggcgtgattatatgattgttaacacactgaagtgcttatatagacatagatactgatttttatatgtacatatttaaaacaaacaaggacttaaaatggcctgtaaaagtctttctagtcagtctttctggttttggacagagaacaaataatcccttacagctgttaggttggtgcaaaagtaattgtggtctttgccattgcttttaatggtaaaaaaaacgcaattacttttgcaccaacctaatagttatctacttccatctttaacgggccctacccaagactgcatggtatataagtaagaaatgtaaatgaaaatctcaaatgctagatctgcccaggaggggaccactaatgagagaggaaatgttaacgtcccatatgaactaagctcagcttagcatttacccttcctgctattccgctagagcagtgcttctcaaaagttgacctgtaatggaatcttctgaatgcctttttaaaacgtagctggctgggccccatccccagagtttctgtgtcagttggtctgggatggggcctgagaatttgcatctctaacaagttctcaggggatgttgccggcccttgaatcacaacttaaaaacctctgctctgaagaaagggaaagctctctctgctggatttccccaagcctttttcagattttcaggagacttctgtgcggtagcttgcttccttctttccatactactactactaccactactactactacaaatagcaacctctagcatattttcagtactaaatacccagcactatatatacatcacaaaagtcccttgaggaaggtggtattatcatctccattctgcggataaggaaatagataagaaatttgctgaagatcgcagagccaaatgagactcaaacccatgtaacccatgtctgtttgactttaaagcccggaatcttaatttgttccagacaagctcattatgtgctctgatcttcaccactgaaatgttctgaatatgaggctgagggcagcagtgaggttggaaggagcagcccagaggagcaggcactgtgctggtagaatagtagtatggtggggcctgcactccctaataaaagaaggggacaatgactatttcctccttctccaaggtcgtgctgcctcccatttctctgtctgcctggtaagaagcagctctgggccatgtgtggtggctcacacttgtaatcccagtgctttgggaggctgaggcgggaggatctcttgagcccaggaaattaagaccaaccctagcaatctagtgggacttcatctctaataaaaataaaaaacttagctgggtgtggtggcacacacctataatcccaactactcaggaggctgaggtgggaggattgcttgagcttgggaagtcgaagctgcagtgagccgtggtctcaccactgcactccagcttgggcagcagggtgagaccctgtctccagaaaaacaaaaagcagcagctctgaaaagaggatctagcagtttctatatgcaggagagcatttgcgcaattgttcctggggttgaatctgagaaactcacagtgcacattcagatactatttacaatcttctaggaatagtataaatattgtggccagggcaccttcatattgtgaaacacaaaaagacttcagaccttagattatgtgtcgaaagttaggcaccaatgatttttttttccatttgttcttaagtggcaaatctttacattaacatttttggtacttgtctttagggaaatttcttctctgttctgaatgtatatattgtaattcctcatttacaattttgcctgcaaatgcaagtgagtacagatcatccagttatgaaaatgctctgagatttgagtctagctgtttcagctttaagagccctgacctagactttgaaactgacatggttttatatgtatgtggttggaattaaacccaaagcacatcttttaaaactctgaggaacttctgtgccacagctttcgctcagttggtgagattttactttgaaatttaagggatgagtctagtttatatgcaaagaaatgtagggagctttgcaaacccaatcaaatcctttgtgaacagtgtgtgcatctgtttattttgctgtcattttgagtccatgatcctgtatactgttttgtgggcacatattgagggtaatatcaaataccatgtagaacagatgctgcaggtatcctttccatgtcctcttagctttggggtggtagatgggcacatggaccaagcccaaagtgacagggtattaacaggagcaagactcaaccaataagggagagtagatgggtacaaatctcagctttctctcccctcactgggataattttgagatatattccaaagatcctcagagcatccccaacagcattgagccccagttccccagattagtaatctactcaataaatacctcttttttttttttttttcccgagatggagtctcactctgcaccctggctggagtgcagtggcacaatctcagctcactgcaacctccacctcccgagttcaagtgattctcctgcctcagcctcttgagtagctgggactacaggcatgcgccaccacacccaactaatttttgtatttttagtagagatggggtttcaccatttggccaggctggtctagaactcctgatctcaagtgatccgcccgccttggcctcccaaagtcctgggattacaggcatgagccaccacgcccagcccaataaagaactctggattgtttcttccttttcctctcctcctttcctgttccctacagtgtttcctaggatcacctcagtctgctgtatgggaaacccagactgagtcaccataacagacagaggcattgttactttaggactttagtggatatagttacatgggagagagagactgtgtatgtatatataacctttataatattaaaccatgctatactcaaattatttactggccaagatttccaatataaattggaaataaattggatataaatcaagaacagttaaaattggaaatagttaaaatacaaataaaatagctaaaattgggcaaaatacctgacccaatgctttaatatccgattgcataattaaacgagtaaagaggaaaggaaattattagcaactctatatttaaatgcaactgacatccaaggaagtcatgaagaaaactctttgtgttgataaactgaaggcctcttctagcagacttctgtgtttattgttctgttgctgactattttattccaaacaaatgaacttgcttgtcattataccccacccttccctagtacagggcccccattctttgaaacagtaactcattcagttccaaggagaatatgaaaagggagggtaatatataaaagaactgaaatgaaaagtggcctaagtgtggcacatttccattgtggattccatggcaatggagaattgatggcagagcatggtgagagatgtgaagcatcaattggctgtatctccagggaattcctgaagttcagttgccaccctggagggtggcaaatgctctctctcaccttccttgagttattgcttagatgactcaaaacaaaaaactgatgagctataaatgggctgtattatttgtttttacctgctgagtagttcagatatttcaaaataatctcaaacttaacctatggtgtggtttctgtgttaaacaaaataccgtaacttttagttgaaaatactgtgtaagcccacacaatctcttgttcacagataatcttgttgtcaaacattcatgatgacaaaaactcataaacgattcttttaaatatcaagaataacttatgctgtaagtcataatttcataagcatgaatttatgaatgtgttttgtgtttgcaattttcatttaggttgtcttaaaatcatgcgttttagcttaacttaggagaaatatatcttttgtgacaacataggatattcagagaaacgtgaaaactaggtgatgtgttttatgaaagaaggcataaagtatatcaagcataagaactttgaattctatttgtgttttttgtggctttagaaaagattgttctgggaatagagaattccatttgggaaacctagcacatacacagtagcagagttaaaatactgacttggagggttcatttgaagaattctatagaatttttgcatgttgggaataggtttatattcttaaacattgcactcagggtttctattcaaagcaaaaataactttgcatagaccttggccattctttcacattctaaagtaatccatttttttttttcagggtagttgttctcagtcctgattttctgataattcagatcatctttaatttacaccaaaaacttttagaagagtcagataataatttaacataaaatgtaaatgactgaaatatacattttttaaaggagcagatatggaggggtccaatgtacttaactatttgctctctttgtctccttgcattcacgggaatgtttctatgtagttttctaatttcacacaatttcaataatccataccctcctcatttttatgggccttcatgatactaaaaatgttaccagaaattattttgtgttagtctctttgtttagcacattcatacataagttttaacatttaactggcatatttttaaagtaatacatgttttttttttaaaaaaaatcagttatgtttgtgtgtgtgcatattttcttttgtggccaaatgttgcacgccctagtccttctatttaaacaatgagtttacataacaaatgttacatgataaacatgaagacatttagtttgaaaaaaaatgattttctagtttactcatttaaaaaaagctgaagtaaccgggaagaggagtggcagaacatattagtctttttcataatgccatcattaaacaaagatacttaatttccaggcctggtgcagtggcgcagcctgtaatcccagtactttgggaggctgaggagggcagatcacttgaggtcaggagttcgagaccagctttgccaatatggtgaaaccctgtctcaaaaaaaaaaaaaaaagaaaaagaaaaagctacataatttccaaaatgacttcagtgggacctgaggtgagggaataaaggctctggagtaatttcactctctattcctctcctaattttttttctgttcctttataacaacattttcactacttttgagcttgggagttgaggaatcatgaccagaagaaaaggaaagacgggaaagatgttcaagggtgaggatgcttaagaatgacctggcaagcttatgaaaatgcagttgtctggatcccaccacagagattctgatttagcaggtctgtggcaaggcctgcgattctgcattgctaaccagctcccaggtgatgacactcatgctggcaacctatgaaccattgagtggcactgttccagggggcagggcaatgagaaattgaagtcaaaagccccaagacctggtgctacgaaaatactctggttccttccctctcaactgatttacttgtcggtgtgattttgcaaaaatccctgaacttcttaaatcccagttacctcacctgaaaagtatgagtgttgctccagatctggaggctttcagaccatgcaaatcgaattcaaaccatgcaaaccattcaagtcattctagaaagttctgcaaggtgcctcagaggccaaagggagagatgggaagagggattgaatgggctctttccaaggttccctaacccacttgaatactttcatcttttatctctttcatatattccacttttgagtatggtttcatttagaaaataggattttataccaacagatttaaagaaaaactccaagtctgaaaatgactcatttatttaaaactgtatagaacaaagacatttagtgcacaattccaaaaattctctgatccttccacagcatgcccagtatgctgcaagagtgccagcaaacacatgcttactgctcacaaatgtgaaatttaaccccatgcactaggaggtccctagtgtggggtggttttagctaaccagactaagagagtacagggcaacatcgagcctttctctgcggtcatgtctgattcattaaaaatccagctttccccgaagatatattaattaccttctgtttcagaatttgtttttagagcctaattcttaattatatctccagccattgtgtgatttgaccattttggaactaaaaagttatcctatgaaattccacctccaactattgccacactgttagtttgtctatttcatacaccatgccaatcttagcgtggtgctagcatttcattataaccagctttcatttttaataagaccatgtgtatatgaaattgtagacttcagtctttgtatgaattgaaagctattaatcttcccagggttaggttatgttaaacagattgtaatgttcttctttttattatgttatttaaatccccttcatttcatactgcaccaatacatttctactatcttggaataaattaattccagttacgtgatggaaaattttagtgtaaaaatataacctgcagtataattttttctgtcagaataccaactagaactggtatgtttcattctaattggaaatttgagttatcgctttgatttttaacagtgggaaaggaaaatgaagattgatatctttcaatagccgttcattcattcttcattccttcattcattcacgtattaagaatagtctatgtgctaagaacagaaagagtgttagagatatgaagattaataagaccagatccctgcctgcaggcatttcctattctatgtcatagatagggggctattctgtttagaggtaaagcatgacccacattgcctctgacaagaagcataatgtctgtagcagctaactgctggagacaggaggctagagggctgccctggtaattggtattcaagtcttcaagaaaggaaaccagctattccaaaatcagtgggcaagaggaagttgtaaagttaagtgaaatgactaaaatatgaataactaaaggttggaatctggtagaaggagaggagagcatcggtcagcaccttagtttgggaaggtggtgtggccatagtaggctttatttagaaagaagcaattcttaggtaccagctaggtttcagttccttaaggggagaaaactggcaaaatataggcaggtttccagggtgcaaagccacgttctagcttcagctcaggcaaggccctggggtatgaatcaccaccagagtagcccagccaaaatgactaagggatctaagctggttgctaatgaaagaggttgcagctcaaggcagctctgctgacgcccactggatactgggattacattgatttaacacatggaaaccacttaatatggtatgtggcacaacacaattaagtactcataaatatttgcagataatgctgctgccattgctgtttttgtcgttagaagactcgggaaaatcatctaatacaggaatccatctgttggcggggcttgggcttctaatatttgactggttgatttttgtcgacccaatcttaacaatattatacacagccattacttcaggaaaggcagttgtaaagaatggtataaatttcctgtaacttgactgccacattctagctgagtcacctctatatacctcagtttctttgtatccgcagtgaagattaatgacctcatagggttgttattagaatgaagtgaattactacactggacttatttaggacagtaactcgcacatagtgagtgctcaaggaaatctcagaccctgcctgctagtggagggtccagctcctgatacatttgggggcaggtttaaggagttcattgatttagagctgtaagggctgatctttcaccctgcatgtcttcagcaactgtggctggtaaagtccagagcagtcaaaggctgacaaatccttgttagaaatcacaaatgcccattctcacaacttctgtggtgttttccatcctttccctagaatactttctttttaaggcaaaggaaagaataatcactgcagatagcacacagtatttttttgcaacatattttcaaaaattatgatgagaaaagtgtatcattcctgtgaagaaacagcataaggaaaatgatttgagaaagaaacatggttcttaaactgaaacaagtgtcagaaggaatcccagaaggcagaaggaaatatagtaatcatgatgaagtctagagctcacaccggttaacagaatggcagcagcgatattcatctcacgcctcttccatgctgtccctgagtgagcttctgctgaattgcctggctggtgaggattggtttcagcagcagaaggaatgggctgccagctgaaggctctggttctgatcctgggtagggtcagagaaagcaagatgtgaccatcacttttgaccttggtcttgaatttgattccatggaacaacgatattttacaaacccagttgaaggtttatccctttttctattcaacacagggagagtccttagagccccaggaagacttagccctttttcattctaagagtaaaccacatctaggtttccagagatgaaaagaccaggctctgatcttccttctggaagcccttgcctattcaacaagcatgagtattaaatgctattgccttggaatcataattcagttttcacagtttgggctatgtcagaaccattcttgtcaaccccctgttttctgagaacccgaaacctgcttgtttagaattttagaatctacttgactcttacaggggagaaaagatctcttttctcacccatcgctaggttcatggctgaggcacctataatgaaggacaaatcaacaacataaaagcatgcgaatttatttaatataagtttcacatgacacaggagccttcagaaatgacccaaagaatcagggaaaagtgtgtatttttatgctctgatttgaggaaaagtagatgtccagtatgactggacaaaggggaatggtaataaactggggtgaccacagcaaggcctgtttctgcagaacctcctgtgtccctgtgttttcagaggtaaaaattttcctttccttccagtatagtaagggcacctctggtatgatagtctcatgacctgcttcaggggagaagggggaaggggaaggtgagagtgaccatcctgcttctgctgtcttctcaaataccaagctgccatattgtggattttggagtagcgtaacttgaatccttttttttttttttttttgagacggagtctcaccctgtaacccaggctggagtgcaatggcacaatctcggctcactacaacctccacctcccaagttcaagtgattctcctgcctcagcctcccgagtaactgggattacaggcacatgccaccatgcctggcaaattttttgtatctttagtagagatggggtttcaccatgttagccggactggtcttgaactcctgacctcgtggtccgcccacttcggcctcccaaagtgctgagccaccgcacccagccgcatagcttgaatcttatcaataccttaaccaaatgactctgacagttttcctcttcttatctaaattcttgagggtcacccacacttcccaatgtcttttgaaacttgacctcttttctgctgaattgaggaagatacctgatttctttaacctcaccaaattcctacttcttactgttgttcattgctggctgaaaatttactttggcgagttcaccaagaacatacttatcggttcactgtttatatttgcactcaagataacacttgaggccctgctactcaaagaatttagtgacaactttcttcatcactctcatatcttatctgtcatcaagtctttttttcctcgtaaaaatgcttttagctctttaagtatgtttcatatctataatagctaagataggctaacagctataatatattaaacatccaccaaatggactattaaaatgacttaaacaaaatagaaatgtatttctttctcatgtaaacagtctaaggtgaattcatgttagttggtgttggatgtgtgtgtgggaagggaggggtgacacccacataattattcaagaatacaggccaggccaggtgcagtggctcacacctgtaatcccagcactttgggaggccaaggtgggcggatcacctgaggtcaggagctcgagaccatcctggccaacatgatgaaaccccatctctactaaaaatacaaaaaatagctaggagtggtggtgggcacctgtaatcccagctacttgggaggctgaagcaggagaatcacttgaagccgggaggcggaggttgcagtgagacaagatcatgccactgcactccagcctggcgacagagcaagactctatctaaaaaaaataaaataaaataaaaataaaaaataaaaaataaattaaaaaaaaaacaggccagcaagggtcttccatctgcaatagccaattgccgaggttgccctcctgaagatattcagccagcccaaaggggaatgagctagaggactgcacacggaggcgtcccatgtcctttgactcaaccttctactggctagaactctgccctgtggccacatgtaacagcagaggggctggaaaatgaagtctagctagatacctaaaaagaagcagagaaaggtttcaagagcatttagcaaccatatccaccttattcatgccctgccctctattcgcagtggccccgcagcactgctcaactagcttgctgcattggcctcttatctcttatctattgccttagatccatctaaatgctctgctactcttatgcctggaatatgttttcaagatgtgactaatcctctcacagcttgaaggataaaaggtcaaactgctctggtgaatgcatgatgcctggtcacctctgtagccccatcttccctgacactttcacagacagtattccctttactccaacctgtgggagtattttctaattcacaataatagcaggaaatacaatgtggaccagacacagttctgagcagtatattaactcatgcatttcttacgataactttataaggttgacagtagtagtatccctatttcacagagaaggaaagagatacagataagtaatttacatatgatctcacagatagtaagtggtacagcttgagtgcatatgactcaaagggtagaggttctagattcttaatcactgtattgtactacttctcccaatgttatcgtacatgccattccgtcttcctggaatacccttcgtctttcttcatctaacttccactcaaactttaaggatcaatttaagcatgccttattttaggtagccatggttgacatcagcctaatttaattgctactcatctatgtccccatagcgtcctttgcattcctctatatctctctgctatagcagtaaatgtaccaccattccgtaaaatccttaagggaatgtttagttttatgttcccaatgccagcacaatgtccagaacagtgttgtcccatagaaatgagagccacctatgtaatcttaagtattctagtagccacgttctttaaaagtagaagtgaaactaatattttattgaccctgatatatccaacatattattatttcaatatgtaatcaataaaaagtattaataaaatttgctttttccattctaagtctttgaaatctggcatgtgtctttcaattgcatcccatctcaatttggacaccgtattttcattgaaaatatttggtctcacctgcacacgtatgtttattgcggcactatttacagtagcaaagacttggaaccaacccaaatgtccatcaatgatagaccggattaagaaaatgtggcacatatatatcatggaatactatgcagccataaagaggatgagttcaagtcctttgtagggacgtggatgaagctggaaaccatcattctgagcaaactatcacaaggacagaaaaccaaacaccacatgttcttactcacaggcgggaattgagcaatgagaacacttggacacagggtggggaacatcacacaccagggcctgtcgtggggtggggggaggggggagggatagcgttaggagatatacctaatgtaaatgacgagttaatgggtgcagcacaccaacatggcacatgtatacatatgtaacaaacccgcacgttgtgcacatgtgccctagaacttaaagtataataaaaaaaaaagaaaatatttggtctctatttacatttcataaactttatagttgaaaaaagaagattcacattcctaagttgttccaaacatacacaaaagtttttcaataactgaaccaagagtcaatttttaaatttatatttaaatttaataaaatggaataaaaatttgttaaacttcagtctctccgtctcactagcctgatttcaattgctcggtagctacctacagccagtggctcctgtgttagacagagcagcacagccctagaacacagtagatcctaaatcgatgtttattgaagaaattaatcaatgacagtgtagaaaatttgcagtgattatgtcagaatcaatagttctccacccattttctcccacactctcaaaagggccaagttttatatcaccaaatgatattcctcttacttctttctgagcagaaacagttttggaaattaagatctttttcaaattttccagactcggcattttagcagcgtttctatttgtaccaacaatgcctttctacctattttccttgcttcttaataagttaactttgtgcgaaggtcattttgtaggtcagtgtaatattgtgcattaagggcttctaagttttctggtattataagaactccttggtttccttctacttttcagaatggaaaatcctcagagcaattttcatctaaaagtgctgcatttaggttgtttcacaattccccaaccctgagtcaaatataggttggtgtatgagcagcagtgtctcttggctaatcaagagcgtctccttttgctacgctcagtgttagagaaatggagaaagtcagctgggtttagagattaggtgagagactcaggcatatcctttgataagtcataaatcatttcctgtttagaaaagcacatgtttagacacccataaaatctccaaatgaagggtgttttacttttccttcaaaatctcactgggaaaaggtacttctgactttccaagtgaataaaaataatgactcctgattaccatgtatgtttaaactgatttgcaaagcaagtgaaaaagagtctagtgagtagtgataagcatcttttagacatcagaagatgtactgatttaaaggtccgtatcattttataactagtatctattgagattcaaatggttattactctgtgtgaatctgtcttttctaattgtttttacttattttagaatatcgatttgtgaatattaaattcctaagttttccagcaatccagtgtttgttttggatatccagcctggatgcagaatagctgcagaaagttatcacaaattgatctctatattctgtttccgagtggcaattgtcaaaaatttggggtcatcggctacccctcccacccctaagaagttccttgtacttcctctttcaaaacactcacatcattgttcagtgcctcacttctctactaaaatgtaaccaaccacaaagatagggactatgtctttcctgtttactggtggattctcagtatctagcaccatgaccaatgttaatagacgttgaatcaattccagttgttacctcttcacactgggacaaaagtccttgcaagtattctgctgccatttgtatagattcaagccaaatatgtctcaaaacgatattacagatgatctcttcgttgttcctctgacaatttctttcccccctgcattgcttaacttgattgacaatgacccctactacttataacatgtgccttttaggtagtgcacttggcactacattttatgtgatagttttatgatgctaaagactatttgctgtgatgatgctgtgttctcacatggcatatccagatttatttatgctggtgaccaaaggcaggtagttaaccttgaaaataggttaaaatttgaaaggcagcaaatcttagggctagaatttataatttatctttaaggaatcttgaaaccaggtgtgaaggaagggacgtaggctagaagtacagaaacctgggttctgctccagcactgatgttaagagcaagttgcattgcttttctggaccttaattttctcttctggaaaatgaatagattaactggaacaaggaaggaaaatacgtgaatggcttccgtttctgtctcgtttacccctgaaagacatggctagtcagtcagctctgtatcagagcacttctcaaggcaatgctccaggtagctaccactcactaatgagagttagcacataggtaaaacctctttgtcatctctaggctacttcatgtttaagatactctccagctttaaaattctaataactctattagactgaaatttaagaatacgagaataatcatccctcaccatgaagagagagtctgaggaaaaaataatgagaacgaataacccttctcttttactacaattcaggactgccatgaagagccgtccagattgtgaaacatacaactcatgatgtgaatggtacttctttgtttttctcggtgtacaacttgcacagctgttcatggccctctgcttccacaaattcatttctaaatagctgtacctcagttctttgacttctagtatgtctaatttaatacacatttctagatttacgatatataagaaatatctccatgaaggaaaaatgtaatagcccatgcttttcattataatagaattttatgaaacaatgtcttttaaaaacagaaacatatgtactactacttcgcaggacattagcccttgtatataaatcaataatacaaaaaattcaaattaccaaggattagaaaagactgctgtgggatatcttctggtgcaagcatacagttatttatccatttctttcatgaatatttattgatgttccaaacattaggctagacactagagacacatcaataaataaaggaaataggtttgatctctatcttctttgatctgtagtttagtgggggaggaaggaaattaaacaagtaactactacaggttgaacatccctgatccaaaaacctgaaatccaaatgttccaaattccaaaactgtttgaatgctgacatgacatcacaaatggaaaactccacttctgacctcatgtgacaagtcacagtgaaaatgcaggcacaccacatagagtttattcagcatccccaagggaagaaagatcctctcagcccccgttagctgtgatatatcttttccacccacacccagattccatcatacaagcaaacccacaaaaggtacgaaaaatggcacatgtgcgggctagacgcgacaacggcaggtaccctacaatgtccagcatggggccaaaacctacgtgcattaatcactgtgtttgctggtatattctctggtggtgtcaagatattgttgaaaatgccctaaaggcctgcatgatatccatagggtaatgcaaatattccaaaacctgaaatttgaaatactttcagtcgcaagtattttggatatgagatattcaacctatagatggtaagggtattactatgatagtgctacgggtgtacatcaaggtaattgaccctggcttggcaggatgcagaaggctttcccaaggaagccttacctcagctgagacctgaagagaagcaggagttagacaggtcaagttggggatttggaggaggtggagtcccagcagatggaatactatgcataaaggcctggaagtgagaaagtcatgtcatgttatttcaagggactagaggaagcttagcaaactggaggcaagaagatagcttcagcacactattgaaattgtccaggtgagtaatgatgatagtgtaactaagttgtgatacctaggtatgtgagctgaacctatggagaaatgttctaggctagagaatctttaattggatatttaattatcagtatatacgtaattaaaaccttgcaagggtttgaaatggttcagagtaaagttcgtagatgagaagagggcctaggagtgaacccaggaaaatggcaaagtttcaggggtaaataaagaaaaataagctttcagtggagacagggaaatttgcagttcagtagataggagacagactaggttcgtgtgatgtcacagaatccaagggaagagaggttttcaagaaaaagtaacatttagaggtgtcaaatactacaaaagcatcatgaaagataagaccaaaatatatcctattaatttagcaacaaggaaggtattgacaacctttatgcaagtgatttcagtgttgattatggagaactcagtaattacttggtggtaactaaagaaccaagattgcagtacgttcaggcatgattgagaattgagaaagtgggggagcaagtgtaaaacaattattttaagacttttggctgcgatgggaagagagaaagggccatagtagcagaagatggatgtaggggcaggaagaacacactcttaaaagggtagtgacttacacatgtttaaatggcaatgagaagaagatggtagagagggagaggttgaggatgcaggagaaattagagataatcaatagcacaggtacttgagaaggcagaaagatgaaatttagaaattagcttcagataggaaggaaagtacagcttctattacaacatcaggggagaagggaaggaggatgggcatagctactggtagttttgtaagtttggtgaaaggttaagtaggattgttgtattggatttattttttattgaagtggaagctgcagctaaatgcccagtgatgaggaaggtgttggagtctgagatttaaggtgagtggcaatttgaaatagctgctctaggatcctatttaacagagaaaatgttgagtacacaatcagtgagcagttttaagtccactctattctgtttgcagtttcaagtacctttcattgcttctaagtttatgaaaactggttcacaatcttcttgtgcttcttatttctacctcttttccttctgttttctcacctccccagtttaaacagtcccgaattttttacaattaaatatacagcaactgccatgaaatctactgataaaagatactgcaaaatcagtttgggattgggttcattagcttacttattattatcaatcctaggccactaagcaaccttgcataaaatgcataaaatgaggagattctagtggaggatagttttcaattatctcattaatttcaggccatgtgactagtccaaatagatattataggccaagaagagcctatcttgagattttaactcccaggataggttttctacctgatcaaaagaatctaataactattcaatctcttcttaaatggtttggttttctgtgcaaacagttttacccttttagctgattttctaggtgttaaattaagaaaattctctcagatacttgttcatcatgtactaggatccctgatgtgttcagagttgtccaactttcaaagggctttgcattcagagtacctaatctaaaccctgatatcattcttttataacagaaaaccccggattagactgggacagtgtctgtcatgttcatcactgcatctccctcagtatttgtagaatgaatgaagggacaatggcaaactatagtcctaccatcacacttttggtagtgaggagaactgctgtaacttggaagattggagggggaaaaggtggctaaaacaatcatacagtaaactgggctgctatcaagagaaaccatttgtcaattttggcttttgttgccattgcttttggtgttttggacatgaagtccttgcccacgcctatgtcctgaatggtaatgcctaggttttcttctagggtttttatggttttaggtctaacgtttaaatctttaatccatcttgaattgatttttgtataaggtgtaaggaagggatccagtttcagctttctacatatggctagccagttttcccagcaccatttattaaatagggaatcctttccccattgcttgtttttctcaggtttgtcaaagatcagatagttgtagatatgcggcattatttctgagggctctgttctgttccattgatctatatctctgttttggtaccagtaccatgctgttttggttactgtagccttgtagtatagtttgaagtcaggtagtgtgatgcctccagctttgttcttttggcttaggattgacttggcgatgcgggctcttttttggttccatatgaactttaaagtagttttttccaattctgtgaagaaagtcattggtagcttgatggggatggcattgaatctgtaaattaccttgggcagtatggccattttcacgatattgattcttcctacccatgagcatggaatattcttccatttgtttgtgtcctcttttatttccttgagcagtggtttgtagttctccttgaagaggtccttcacatcccttgtaagttggattcctaggtattttattctctttgaagcaattgtgaatgggagttcactcatgatttggctctctgtttgtctgttgttggtgtataagaatgcttgtgattttagtacattgattttgtatcctgagactttgctgaagttgcttatcagcttaaggagattttgggctgagacgatggggttttctagataaacaatcatgtcgtctgcaaacagggacaatttgacttcctcttttcctaattgaataccctttatttccttctcctgcctgattgccctggccagaacttccaacactatgttgaataggagtggtgagagagggcatccctgtcttgtgccagtttttaaagggaatgcttccagtttttgcccattcagtatgatattggctgtgggtttgtcatagatagctcttattattttgaaatacgtcccatcaatacctaatttattgagagtttttagcatgaagggttgttgaattttgtcaaaggctttttctgcatctattgagataatcatgtggtttttgtctttggctctgtttatatgctggattacatttattgatttgcgtatattgaaccagccttgcatcccagggatgaagcccacttgatcatggtggataagctttttgatgtgctgctggattcggtttgccagtattttattgaggagttttgcatcaatgttcatcaaggatattggtctaaaattctcttttttggttgtgtctctgcccggctttggtatcagaatgatgctggcctcataaaatgagttagggaggattccctctttttctattgattggaatagtttcagaaggaatggtaccagttcctccttgtacctctggtagaattcggctgtgaatccatctggtcctggactctttttggttggtaaaatattgattattgccacaatttcagagcctgttattggtctattcagagattcaacttcttcctggtttagtcttgggagagtgtatgtgtcgaggaatgtatccatttcttctagattttctagtttatttgcatagaggtgtttgtagtattctctgatggtagtttgtatttctgtgggatcggtggtgatatcccctttatcattttttattgtgtctatttgattcttctctctttttttctttattagtcttgctagcggtctatcaattttgttgatcctttcaaaaaaccagctcctggattcattgattttttgaagggttttttgtgtctctatttccttcagttctgctctgattttagttatttcttgccttctgctagcttttgaatgtgtttgctcttgcttttctagttcttttaattgtgatgttagggtgtcaattttggatctttcctgctttctcttgtaggcatttagtgctataaatttccctctacacactgctttgaatgcgtcccagagattctggtatgtggtgtctttgttctcgttggtttcaaagaacatctttatttctgccttcatttcgttatgtacccagtagtcattcaggagcaggttgttcagtttccatgtagttgagcggctttgagtgagattcttaatcctgagttctagtttgattgcactgtggtctgagagatagtttgttataatttctgttcttttacatttgctgaggagagctttacttccaagtatgtggtcaattttggaataggtgtggtgtggtgctgaaaaaaatgtatattctgttgatttggggtggagagttctgtagatgtctattaggtctccttggtgcagagctgagttcaattcctgggtatccttgttgactttctgtctcgttgatctgtctaatgttgacagtggggtgttaaagtctcccattattaatgtgtgggagtctaagtctctttgtaggtcactcaggacttgctttatgaatctgggtgctcctgtattgggtgcataaatatttaggatagttagctcctcttgttgaattgatccctttaccattatgtaatggccttctttgtctcttttgatctttgttggtttaaagtctgttttatcagagactaggattgcaacccctgcctttttttgttttccatttgcttggtagatcttcctccatccttttattttgagcctatgtgtgtctctgcacgtgagatgggtttcctgaatacagcacactgatgggtcttgactctttatccaacttgccagtctgtgtcttttaattgcagaatttagtccatttatatttaaagttaatattgttatgtgtgaatttgatcctgtcattatgatgttagctggtgattttgctcattagttgatgcagtttcttcctagtctcgatggtctttacattttggcatgattttgcagcggctggtaccggttgttcctttccatgtttagcgcttccttcaggagctcttttagggcaggcctggtggtgacaaaatctctcagcatttgcttgtctataaagtattttatttctccttcacttatgaagcttagtttggctggatatgaaattctgggttgaaaattcttttctttaagaatgttgaatattggcccccactctcttctggcttgtagggtttctgccgagagatccgctgttagtctgatgggctttcctttgagggtaactcgacctttctctctggctgcccttaacattttttccttcatttcaacttggtgaatctgacaattatgtgtcttggagttgctcttctcgaggagtatctttgtggcgttctctgtatttcctgaatctgaacgttggcctgccttactagattggggaagttctcctggataatatcctgcagagtgttttccaacttggttccattctccacatcactttcaggtacaccaatcagacgtagatttggtcttttcacatagtcccatatttcttggaggctttgctcatttctttttattcttttttctctaaacttcccttctcgcttcatttcattcatttcatcttccattgctgataccctttcttccagttgatcgcatcggctcctgaggcttctgcattcttcacgtagttctcgagccttggttttcagctccatcagctcctttaagcacttctctgtattcgttattctagttatacattcttctaaatttttttcaaagtttttcaaaagcaatggcaacaaaagccaaaattgacaaatgggatctaattaaactcaagagcttctgcacagcaaaagaaactaccatcagagtgaacaggcaacctacaacatgggagaaaatttccgcaacctactcatctgacaaagggctaatatccagaatctacaatgaactcaaacaaatttacaagaaaaaaacaaacaaccccatcaaaaagtgggcgaaggacatgaacagacacttctcaaaagaagacatttatgcagccaaaaaacacatgaagaaatgctcatcatcactggccatcagagaaatgcaaatcaaaaccactatgagatatcatctcacaccagttagaatggcaatcattaaaaagtcaggaaacaacaggtgctggagaggatgtggagaaataggaacactcttacactgttggtgggactgtaaactagttcaaccattgtggaagtcagtgtggcgattcctcagggatctagaactagaaataccatttgacccagccatcccattactgggtatatacccaaaggactataaatcatgctgctataaagacacatgcacacgtatgtttattgcggcactattcacaatagcaaagacttggaaccaacccaaatgtccaacaatgatagactggattaagaaaatgtggcacatatccaccatggaatactatgcagccataaaaaatgatgagttcatgtccgttgtagggacatggatgaaattggaaaccatcattctcagtaaactatcgcaagaacaaaaaaccaaacaccgcatattctcactcataggtgggaattgaacaatgagatcacatggacacaggaaggggaatatcacactctggggactgtggtggggtcgggggaggggggagggatagcattgggagatatacctaatgctagatgacacgttagtgggtgcagcgcaccagcatggcacatgtatacatatgtaactaacctgcacaatgtgcacatgtaccctaaaacttagagtataataaaaaaaaaaaaaaaattaaaaaaaaaaaaaaaaaaaaaagagaaaccagtgctctattatctaggtatataccaaggttacccactgcttgactctcattattagccttctttgatgttctctggtacttgatgtctttcataactaatcaatgtattaatgtatccaatcatttactcgataactttattgaaagcaaaagcagttgcataccagctatcaagctggaagtgggagatacagccgcagacaaggcagatatggtcccagcccttaggagctcccagagtagcaggaggtttccccttccagtgtcttctctctgcttttcttcaaaaggaaaaggctgatgtgtataatataccatatctctttgaagttctctgattatggattttaggtttaaaccagttcttcatccatgactttataaattgaaaatccaggattttgctgtgttgttgtgttcttgttttgttttgatgtccctgttttctctagatacagttagaaatgtctaggaagaaatttttggttagtatgggagccccacaaagccatttttttaaacataaaatctgtattacatatcaggtatgaaatacagggggaatgaatcatttctccgtaaaggaaaatttaaagtaaatttcaggaaagtgaattctttcccgtttgcattaccgacagatgcagaaactttaatcgtcatttgctaagagggatatggcagataatacacaatagatgtcgtagcaacattcactcgcattctttttttttttttttaaagaaatctttctttcaagaagctattctaggatctttctcatgacagtgtcctagttcttatctttgctacacacaggctcacaaagtgttttctttgaagggcattttgttattggccctcttttcatttttcttttccgtagcaaacagaaccgaaggtgtttactccccacggtgagagggcacctgggtgcacaaacagtggtgtgaaccactggcctttctctgctttccgttccctgaatgtaagaaacaggtgcagtgatcaattcactgcgtgcagtgaaccccaggcagaaagagaacgtcgtgtcacagaccttttgttacttggagagaatgagcgggaagaaaggctgcctctgctgctactgagacccttttgcccattttattgactgctataggttcatctatcctaatttgtctccggctgtcccagtttatccctgttattcttgtgttactttactttactatattttattttattttattttatttattttagagacagagtcttgctctgtcacccaggctggagtggagtggcatgatcatagctcactgcagcctcaaactcctgagctcaagcaatcctcctccttcagcctactgagtagccaggattatagctgtgcaccactatgcccacctaattttttttttttttgaaatggagtctcgctctgtcacccaagctgcagtgcagtggtgcgatctcggctcactgcaacctccacctcccgggttcaagcgattctcctgcctcagcctcctgagtagctgggattacaggtgcccaccaccatgccctgctaatttttgtatttttagtagagacagagtttcgccatgttggccaggctgttctcaaactcctttaactgtttttttatttttatttttaatttttaaaacatattgtagagataagagtcatgctacattgcccaggctgatctcaaactcctggcttcaagcaatactcctacctcggcctcccaaagcacctggattacaggcatgagccagtgtgcctgaccctgtgtgattattattagcatcctggacactctcaaaagtgttcaggtttggacaatgaactataggatcaccctaattacatgagattaagagtagagaccttgaccaccagaaatggtcaatactcaccatatattttcttcctgatgttagaacctggtacttttgggaaatgaaattgtacatgagatatatgcagaatgggcgaagggagcgaaaagatttaaaaaattaagctcgatttattgagcgcctcgagtgcgctcagtgctgttccaagtgctgacagcagagaggtaagttctgttctccagtgttcacctcacacgtgcaagccaggtttgaaaacacactgtctttccttagtatccctccacccctccatgtgactatacgtatgtatcaagtttgtgatatttcacttctgggcttcttttcatttggaaatttaatgtcagtgtatcatgttttaattaataggacatcatgttatgaaactgttgaatcgaatattttccctaggcatcaaattacttgtcagtggaaatttgacatctagatatgagggacaaaagagatgagaaaaataatagtaaagtgttcctaaaggatgctggtatactgtttaggtattttaatgcactgttacaacctaaagtgtcttgtaaagtatgttctttagaaataaaataaataaaacaagacatctctccataggtacaaatccacttgccttcctcaattcctatccttctgtgatgggaaatctctgctgtgacaaagaaccatgttaagaaaaccataaagttgtattgtttgtagatttttttaatgactaaaggaagatattgcaagtagtagaaacaaatagaggaggtggccctgaaggtcaatataacggagttcactgcagaaaagagaaactactctaggtacgttagacacatatcaaagttttggaaaggctaaagtagcaggttttagacttggcttcgaggacagatttctaaaactatatagaactgatccaataagaaactaccatctccggggtaccactgaagcaatgatttcaagaacatactttgtaaataggaactaggaaccaggaggttgaaatctagacgctaccacttttgaagctgctgttagcaactgcccttctccagccaggaagctggagaaagaactttggaactctgatgtaggaaatctcatgtttctttgactaagctcgccaacagaaatagccaaaaggggcagaaaggtgacctatgcctcacttccactttccagatctctcacaagtatacacatttggcaaaacgttgccagatttagcaaataaaaataatgcatgcaacatacttaacactaaataaaaaaagattgtgtagaaaatttaaatttaactgggtgccttgtattttatctgacaaccctaacttattatatcctaattcataatcagaacactagctgcatggaagtctggcaaatacagtttttaatttccaacctgtccaactggaaggatggtaagtagatttaggtgagccagttcacagtattaaccaaagtagattgcctaccaagaatagctaaagcctttctgcccccagacgcttatgctaccatctgaatatttttactttgcattcttatattcttggaaatcctatcaatctgtgattcagattggtttggtttaactcagcttccccttttttttggagacagggtcataccctgtcacccaggctggagtgcagtggcacaatcatggctcactgcaacttcgacatccctgggctcaggtgatcctccctcccacctcagcctcccaagtggctgggactacaggcacgtgccaccacaccccgctactttttgtattttctgtagaaacagagtttcgccacattgcctaagctggtctcagattcctgggctgaagtgatccacccaccttggcctgacaacgtgctggaattacagatgtgagccaccatgcccagcccctctttttaaaatataaaaatctcccagaatgtgaaagttgtcagtctatactttgggaataagattttcaacagatagaagagaatgaggattaaaacataaggaagtttgggagtagaaaatatgggcaccagaaggtggaaggagagagcagatgcccatttatatatctcctttgttgggtgttggacaaatccaggtcttaaaataggaagtatttcttttccgtacttcttgaatctttcatatcccaaaagatgcatatttcccaaatcatataacccaaagtcatgctatcaaaatgatataaatcatccatggtataggttaaatagctatatatgtatatgctggtctgagacatgtatatgactattgtgtccatggaaatttgagtttggggttctggaccatttatttgcaagtgatttttggttagagaactctttgtaagttggggattgcttttacttattttatgagtaaagatgtcaaaaggatgactgctaaatttgcactgtgttaattcactatttagtgagaagaaatattagactagctatgaaaagtaaaactgcctctccaaaaagtcaaagctgatgaaaaacagtcatacaagcacaatgccgctcttcggaaacatggaaacactttttccttcccaattttccctcagattttctcttccgcatttaaaacacttgggtggttcaagtttctaggctaccactgattgtaacagcaaacagtagcaactggaagcagtgggatgttgggagaagtaatagaggtagctgctacccaagttatcctggaggattttccatggcaatgaaatcaggtagtagaagcttggctaactgagtgtaagcaaacagttctactgagaatggtgttgtcttttcaatccgtttatctgtgatggtgatagtgtgaaacaggggaattttatccaaggtttaaggaaggttatttggttaaaagaggatattgttacagtgaagtcaaactttccattaactttttgctgtaacaacagattgaacgtagcatttcaccgtcaacgagtaaagtgaaatttacagattaacttatgtgcctcttttaaaatatatcagatttctaaattgcttttatttcagaggtatgggaggttcactttctctttgaaagtgtacattatttttctagtgtcttacatctgcctacaaagatgttattttacttgaaagcacagtaactatttgatgagaatttgtcagcatcagtaaattaaagaccctcaaatgatttctactaattatagtttaattccgtacatttaatgatattttaaaacacatgagttatttcataactcccaacatcacaaggataaattttattctacaaacaaaatattgtgctaaatgaaatagttcatttaggcaaagaaaggagcacagaaaattagtggaactctctgctgtaagtaacgtagacattacatggcatattgagtctccatgaatattgtcatgttatgttttaaaaaggtgatcgaacatatggcatttaaaagttccaagtcctcttttaaatgcttcagaatctattatttaatgatcatcttggatctcaaaactgatcttttgaaagattttattcgccccatgtgttaatatgatttccctgtcatatgatatgattatctatcaatacttaaaaccagcagccaagtaaaaaatcagttcatatcatttaatgaatactatgagtcaggatctgggtaggcaagctattttcgggtttgagtagttccaaagcttaaaaatcttatattgattttacagtgaagaagaaatagtcttagctactttggaggtttcaaacattgactactcaaggagtatttccttgctttctcaggcaccaggcagtttttcaggagcaagcattcatccattcagggaattgtaacctgtagtttccacttttctagcaatcacacttaaaaccatgagagtaggccataggacataaggagctcagcttctcagggcaagcacatcctttcagctttcacctgtccgtttgttagtgttcacttccgtgctcaaggagtttcttgttgcctctgagttctaagagacagaacgaagggagaagggtgcagaagtctaacgcatgttcatggacttatctctccaataaagagcttgttttatcttcttttatttatttattttttctaatgaagccattagcctcaaacaaagccatggaatcttatcagagtgaaaccggggtcattccataggctggctgagtgagagctccatggcacgatgatgtatggtcactgcacaacaacgcctttgccacaacacatgtgccttttaattacactttaaatctcatttgaagagatgttatcattatggaaattgctctgtaaatgtgcccaggatgagacccaataaaagtttgctgagaagaattgaagacagaggagatgaatcagcagctaaaacattaccatcagacagaattttcttggctgtaggcaaaacagcccatgcaataacagaaaatcttcattgactcagaggcgtattttccctagattattatggggcactcctgcctgtagcactatcacttctttgataagctgaaggaagcgttctgctctccagctcagcgggcctttttctccccaacctcagagccatcatttgaatttatagttgccaaaatgaataatacagtattgcccttgtgttcctgacttcatgcatgcatgcagagcggggttaaggttctttaaatgaaagattgccttctattcatgcaataaagaacacctctgcttcctttccagggtcatttaaaaataactataccgctgggctatggaaagcacataagaaagattcttagggtaaagtcaaaatgctcttttctctacaacaggcattgtctcatatctttgtgtagcacagctgatttgaagttttcttttaagcacattcttaattatcttttcctttgatcttgaactgtttccctgggctaccagacagagagcctagagccctacctccgctttccccgaggtgcaaactgctccgtccttccacaggcaggcccctggctgaatgcacccttttctccatggttacccacccacctctctgttatttgttacttcccaagtgaatggcaggttaaaatgggaaaaggtcaggttatctgaatgtggttagagtgaaatgaatttcctcattgcacccaagaactgtcctttgacaggtctccttccccaaatcgggtcattttgtacgtaggctcactgggagtaattctaagacaactaaataagtaaaatcacattttggtgccattttccaatgtattcttcttcttgggggttctcctttaaaatggtactggaaggatacgttgtcttcattaatccattgtatgtcccgggggtggaggtggaggtggcagtagcagaagcccgtgaagtaataggtcgtattttgtgtttataaatatttctgcaggtttttgaggagaagatccatcattcttataaaggcattcatgacctccagaagattaagggctgttatgctagaacagtgtttcattcttaaaatggggtctctggactagcagtatcggcatcacttgggaacttctaagaaatgcaaattcttgagttctaccccagacatacagaatcatgatctctcagagtggagcccagcagcctgtgttttaatgagccctctgggtgattctcaagcccactcaagtttgagaaccactgtactaagggaactactgatgcatgatgcaagttcacgctcacaggcacgtgtgaatgacacaaagaacacagacgcctgagagagcaagaaagacaacatagactgtctgactccctgctgggcccttctttaccgcccctatttcaggctaccatgcccatgagtggatgacacgtaccccccgacaaaggtcaacaccactctcccttccacaccctatcactaagtgacaggctaagcctatgttaaactgctcacatctccttggaaattcaacactttaataataggtagcattatcacccccatcttcttctctaagccagaaacccaacttgcctccctatatgttatccttgcattcagtcagtctctaagttgtattcatgatctctcaaaaatatctccctttttctcatcctgtgtctattacctcagtttagatctccatattctcttgcctctaatgttcttgcctctaatgtaccttttcactgccaccaagatgatgttaccaaaaaatcttaaacagattagacatcttcacaggataaagtccaaacccttagcttgatacacaagccccttcacaatccaggccctccttcctgtgcagctatatatatatatatatatatatagagagagagagagagagagagagagagagagagagagaaattttgatcttaccactctgtctctcttcccgccatgggtcttcccctcttccctccggagttacttagctctgatgtgtattcttatctcgtcttatcttcaacttcattcatgtttttcccactgcttcaaatttcactctcccacttctcccctggccagctgctactcatccctcaagaccctgatcaaatatcatcacttgtatgatggcatctgcaaatcttggggggcaaggctaattgttctttgttcccacagggctgtgttccagtttaacatgatcacatgttattttggttcatttatttgcttaagactttttcagaaggctatgggctctttaaaatagagaacttacatcttgtagttttaagagtatttttagtaaaagtttagagtgacccccatctttctgccagcccacaaaaggaaaacatcaaaaagtgaatgtgtaaaaggaagagaactctgacaaaaccaggcagaaaggtttttcagcaagtctttttattttctgttcaggataacattaataattatccacgttggtttctcattctcctgttggtgaatatttttctgctaaatttaaaaccgtatcacaaactcaagcagagatttacaacatttcaacagcttttctacccctgccttagaagggtggatcaaaaacatttgtccatggtaaagcactatggacatgacttagttaacaattctctgtttgggtcaccatgaggcttcttcgtttatactcagggtcagcgacaatgctgatatgcagctacaatttctcatttcttactcagggtgttatgaagcagatttccactgttctttaatcgttattaaaatgtagtccaggtgcagtggctcacgcctataatcccagcactttgggaagctgaggcaggtgggtcacataaggttaggagttcgacaccagcctggccaacatggtgaaaccctgtctctactaaaaataaaaaaactggccgggcatggtggcaggtgcctgtaatcccagctactcaggaggctgaggcaggagaatcgcttgaacccaggagggggacagaggttgcagtgagccgagatcacaccattgcactccagcctgggcgacaagagcaaaactctgtctcaaaaaaaaaaaaaagtcattctcatgtaaaaattcttgtaaaataatctgtaaagtcatcctcttatctgttctagttcttcataagacttatataacatgtcatatgggcatggaaaggcctaagccttcccaaaccttgctcttttggggatgattttccaaatgtacttgttctcagttgaaaagagcattgcggccgggcgcggtggctcaacgcctgtaatcccagcactttgggaggctgaggtgggcagatcacgaggtcaggagatcgagaccatcctggctaacatggtgacaccccgtatctacttaaaatacaaaaaattagccgggcgtggtggcgggcgcctgtagtcccagctacttgggaggctgaggcaggagaatggcgtgaacccgggaggtggagcttgcagtgagccgagatcgcgccactgcactccagcctgggcaacagagcaagactccgtctcaaaaaaaaagaagaagaaaagaacattgcatcatggcacaaggacacaaaaaataccctggacctgcttcagtgagatggtctaagggtctctagcatcttctgaactgaactgaatgctttgggaagaattaatagatacacgatgtatattagttcgtttcacactgctataaagaacttccctgagactggggtaatttatttaaagaaaaagaggtttagttgactcacagttctgtgtggctggggaggcctcaggaaacttataatcatggtggaaagcaaaggggaaggaagcaccttcacaaggcagcaggagagagagagaaagagtgaatgggaagagccccttataaaaccatcaaatctcatgagaactcactcactatcacatgggaaaacagcatgggggaagccacccccatgatccaatcacctcccaccaggttcccccggattacagttctagatgagatttgggtgaggacacaaagccaaaccatatcacaatggaaagctcatgaatgggttctaagaatgaggaaatgtaccttagcattttgcctacttttcctttatgacatttttttcccggcaaatatgccaaatattacctacctttacatcagtgtccacatgcatatcccctgtcttcctccttttcctcatacattaacaaaagagtaactttgttttctccccatcactgttcaccctattgtataagagaagaaaagcaaaataggatgaaagaactatctaggcacacacacaaaagtcacactctccagaagaaagaatttgctctacttggtagtagacagaaattaactcactgaagatcaccagagaatcagatccaattatatcagcaggactttagtttacatcatggtactagaaccttctttaacattcaaaacttatgaatacctagaaatagttttaaggttaatatctctatgctgtgggctaaagagtacccacaaatgaatacagttgtgtctgatgagtgtctgtgattattttggaaattgtcctgctatttaaaatgaaaaaaatagaaatgtcttagattttcctatcattaacctattgtaaacaattacatcagtgtagggttgttttgtggttgcgtgggagtattttgaggtttttagggggtaaagtgggggatagaatgaagttgttgtttgcatttacaaccctaataattaaaacaagccagagggaattacctacatggctgttgtgatttctagtgtatgatcaaaaataattatggcactttgccatatgttcttgctttcttcttagatatgtgttattgggaaaagatgagacttgacatcaactaattgcttttttctaatatacaaccttgaaccacagtgattctctggaggacaaaaaatagcttagtgacaaagagattccagaaataagagcttttcgagcttttaactctctatgtaatatagacaaattgcacagattaatataaccaaatatgtattggtccatgggaagagagttacctatttgaagaataggagtgtattgtgttcatttagaaccattcagaaacatcaatgatattagttctgagttgactaaggataaatttttaaaagcaatacctaattggaaaattattcagttgttgaccattcctatcagtgctctgaaactaaatatctcacagatgccttaatgagttattataattatgttgctgtgatacatgtagcccaagtcagaagtcacttgctttgtatttaatggatggggaagacactggagcttggagggaagagaataaaaataacctagtttcaggaagatctatgctctaaccctgcttctgccacataacaacaactctatgatttgtataagttactttacctctcaaactcgtggtttcctcgataggggataaagaaggcctatttcatagagttggtgtaaaggatttataagggctgtaagtattagttcctgccctgtttcatccccctaccctacccccacccctcatcatggctctgcaaaaacaaatatgtctcagagttggaaagacccatctggtctttctcagataagggtagttttcttcaaacagactgattcctgcacataaaatataatataaaaaaccaaaagtaccttcaacattgtagacttttcatatgtggttgtctctgtgacttaaatgtacaatctagggtttgcatgttaaggtctttcaagattactgttggcactgatctgaaagatgtctcatgcaggaaatgctcacccaattatgagcactgaggctgtatagcaatatcagaaataatattgcagcacagtattttctatggattttagatgcagtattaaaaaaagaaaactcagcctgtctttaagactcgttttctctttcaacaccagaattaaaaggcatgccattcttttttaaagtttatgtgcagagccaaatgaatatcaacattagttctccactgggtccacggcttctttttaaaaatatctgaagcagtgttactctacccactttttctcaggaaattgtgtcctttagaactggcacccatatagtttaggaatgcttgatagggtatattttaggtgggagtcacctgtgcctatatggagctttgatgtcaatgcccttgtcatttggtgtcaatggttttgtcattctaatttatttggccccaaggtgtgtgtgtgtgtgtgtgtgtgtgtgtgtgtgtgtgtgtgtgtgtttgaaacacagcatatgtatttttttcttactccttgagaaatagaactttaaataacatttctatctttaaaatgtacttgtgaatagttatcactttcctgaattctaccttccaaaggtaggacaagagaaggatggaattaaatcacacatgcagctatttttataacttatgagcactcaatgatggtagcatccctcttctttaccttctctctgattctgaagccactgctgttttggttcctgtatggctgggactgcctgtccactagacttcctgccttcactctgaccctgctacatttaccctgaacaccatcctcccaataatcattaccagatgctattttcacaatgttacacctttacacaagaagctacagtggaatattatccttacagaatcagataaaaatctccaggcggcattctaagctctcattggctacactgtaccctttgaacctgaacttcctgagaactacctcttagctcctgcctgtagctctggctcccatcttcatgcagtaggtattcgttttcttttgaacggcctcatatcttctctgctagcaggattggagtcatggcagaaagtgagagggggactagaaggatgcaacattaatgaaacctcacaataggttaggcattgggttaggtacttggttgatctactcacatcatctcatctaatctttgccaaaaccttaaaaggtaggtattatcggccctacttatagacatacaataggtacttaatgcacatttttgtgatgaataaatattcgggaatttttgcattgtgactggatgagaagaaactaggaaaaacaagacgtagatgagaaagatacctctcatcttacttccaacctaggagatcttaaatgaactcatcagttttaaaaggtaatcttaagaatggagtcagagggtcacacaaggagagaaagcatcacgtattaccagagttcgggattgcttaaggcggtttgacagtttcctccgggggtaatccaccctaggccaggcatttttaaagattagattttgaaatgaagctttgcacttgggaatatactgaggcaagaaagcatatcccttctccctgctgagagagcatatcccttctctctgctgttgcagtgcttaagtgtgagaattttcgaatgagatatgaaagcaaagacaacaaaccctgcaggataatagtctctgaggactttaataacagccgtttttaaagcaaagcctgtggactcctaaatccatagctgctcgtttaagatgcaacgcaatgcagtggacctgaaaacatactccttatctacctagagcaaccaggctccaagccaaacagcagtcctcaaattaactcttgtttctcttgggacgacaactctgctgcttttaaaggtgttgcgtggccacatatagaataagaagggaaaaaacagtcacaccctcttgtgagtctgtatccaactgcattttctgatctggttaggaacctccggtggttagattagaatcctgataaggccaagactgtgggtccaatttcttcctatggattcttctcgaaaaacttgttaggaaagatccacttcgggtttttttttttttttttttgcgcttgttttaattcccaatccataatagactgatacttttgtaacatgcaataaaaatgaattattttaaaaattacaaataccagacatacaaaatttaagccgatgctttttatttttagattgctgtacacgtttctaaagatttgctttcaatttctgttcttatgtcttcataatagaatatctgtttctgtgtgtgtatacgtatgagtgtatgcaagtgtgctccaaaagctctactatttagagctcatgtttaatgagtcatgttggataaccagtctaagggagttctactttcatataattgtttttgttttatttttatttaaatcattaacaccttttcaaaacaactgtatcaaataacagtcatttggtcatttgaagcatttacatacactgctttcttcttaaacagattttactgaatgtaaatctgctttccctggctaattcagcatcatcatcctgagcattaactattttgcttcgctataaaacgaggtgatgccttcaagggctactgatgcatggagagctgttagtttccacactgtgtgaccctggtcaattatgcatgcccatggctccttttacacctttctgattctctgtaaggtgtcacttcttcctactctcaatttagccacttaggataatttctttactattttgaattgtatgttcctgaccttctaagttcttagaaatcagaccactttttttcccatcaagctaatttaaattagataaaaattatcagtaaggaggaactaatggccttataattattcatatactaactgctttcagaaaagcttagagataatctgtctataataaaattcttaaggagatttggtcacttattgttattctttctacaccattgtgtttgtttccttacttctcagctatattaaaatggggaagttttcatttgctgagtcctattttagagaccaataattccatttacataggaaaggaaatatgtggatacgattattcatgatgttctagaatagtatcacaaccatctgcttaatggttaataaaatggttaataataaaaagaagggtacagcactaattcttgacatctcccttctttatttttcttctagtaaaacatccataacttttcctattcttccccagttgtattattacttatgaacaccatggatcattctactttttgaatgaaatagtacaaatttaatattcgataatcttgtctttgtacttttctttctaaacttttattctcggtggcttcctaaaggaagactttattctacttggtttaagcagttggtctgcattctacctatttctctcaactctcattgtccattccaatcaggttgtgcaattcattgtccctgctcataaaccaaattcatttcacctttactccattcccatgctattctttttacctggaatattttcttttgttccaatttcccaatcgtatacatccctcaaggctcaagccaagtcctgtaacttcatgaaatctatttctaacatctgatttccacatggattatcttgtaatagtaagccctgcatttgctattatttattaaagatctcttgtgttctagacgctattcaaagtattttacaaaaattccatgtaatattcaaaaaattcagcaggtatgtattattatttcatgtttagtgaaaccaaagtaatgaaagagttttcatcattatgtggctaataagggaaagagaagagaagggtcaaacctatgtctatttaactgcactttgccatgagttttctctggaagctgagaaaggagattcacaacaagagtagatgagactcagataagaaggaagtgtggaatttgaaaaagcccttcagaaaacaggatctcccctactcctaaaactgctatactgtgaacatattgcttgtctcataactgaacttttttggtactctcagctgaaatttgctctataattgtacagaactttaggccaaatgtttcttttatggggacacacattatttgtttcgtttgcacccattttctcaattactttgtgttttctcttgttgtattggatgcatctctatccactgctacaaatctgtttaatagtctttatattaataagaccatgaaattgctctttgtgtgctgacatagttatcctttattttctaatggcagtgctagatttgctaaaatttaggtagtagcattattaataggaaaaactaccaccaacaactaaacttgaaaggtaatatagcctagtggctaagagcacaatccctgaagtctgactgacgaggttctaaatcttgctgcatttattagctgtgtgaacctgggcatttttagttaaccttacagtagtttcattatcttatatggaaaatgaagataatagtagcccctaccctagagggttgttgagaggagaaaatgagctcatgtatatacagtgctttggacagcacctgatgtacagtaaggttcatgtatgttgttgttcttgctgctgctgctgctgctatggtttttgttatgtaacaactaccttttcccctttgttcattcgttattgcttttcctaaagactacaatcacaaaaaagaagaaaaaaattagagagcatacagtgaatgcagtaatgaaggcttgaatgatcttttctagttaagtcagaagtgaaataaaactatccaaaaatttctatgaaaattatcctttgtccagattggctacccactgagaactccacttgattctccatatcaatcttttgctcttttgtgctacctgagtctgaggtgtagtctttaaatgatgagtttattggcacaagacagggatgccctctctcaccactcctattcaacatagtgttggaagttctggccagggcaatcaggcaggagaaggaaataaagggtattcaattaggaaaagaggaagtcaaattgtccctgtttgcagacgacatgattgtatatctagaaaaccccatcgtctcagcccaaaatctccttaagctgataagcaacttcagcaaagtctcaggatacaaaatcaatgtacaaaaatcacaagcattcttatacaccaacaacagacaaacagagagccaaatcatgagtgaactcccattcacaattgcttcaaagagaataaaatacctaggaatgcaacttacaagggatgtgaaggacctcttcaaggagaactacaaaccactgctcaaggaaataaaagaggacacaaacaaatggaagaacattccatgctcatgggtaggaagaatcaatattgtgaaaatggccatactgcccaaggtgatttacagattcaatgccatccccatcaagctaccaatgcctttcttcacagaattggaaaaaactactttaaagttcatatggaaccaaaaaagagcccacatcgccaagtcaatcctgagccaaaagaacaaagctggaggcatcacactagctgacttcaaactatactacaaggctacagtaaccaaaacaacatggtactggtaccaaaacagagatatagatcagtggaacagaacagagccctcagaaataatgccgcatatctacaactatctgatctttaacaaacctgagaaaaacaagcaatggggaaaggattccctatttaataaatggtgctgggaaaactggctagccatatgtagaaagctgaaactggatcccttccttacaccttatacaaaaatcaattcaagatggattaaagacttaaacgttagacctaaaaccataaaaaccctagaagaaaacctaggcattaccattcaggacataggcatgggcaaggacttcatgtctaaaacaccaaaagcaatggcaacaaaagccagaattgacaaatgggatctaattaaactaaagagcttctgcacagcaaaagaaactaccatcagagtgaacaggcaacctacaacatgggagaaaattttcgcaacctactcatctgacaaagggctaatatccagaatctacaatgaactcaaacaaatgtacaagaaaaaaacaaacaaccccatcaaaaagtgggtgaaggacatgaacagacacttctcaaaagaagacatttatgcagccaaaagacacatgaaaaaatgctcaccatcactggccatcagagaaatgcaaatcaaaaccacaatgagataccatctcacaccagttagaatggcaatcatttaaaagtcaggaaacaacaggtgctggagaggatgtggagaaataggaacacttctacactgttggtgggactgtaaactagttcaaccattgtggaagtcagtgtggcgattcctcagggatctagaactagaaataccatttgacccagccatcccattactgggtatatacccaaaggactataaatcatgctgctataaagacacatgcacacgtatgtttattgcggcactattcacaatagcaaagacttggaaccaacccaaatgtccaacagtgatagactggattaagaaaatgtggcacatatacaccatggaatactatgcagccataaaaaaaggatgagttcacatcctttgtagggacatggatgaaattggaaatcattattctcagtaaactatcacaagaacagaacaccaaacaccgcatattctcactcataggtgggaattgaacaatgagaacacatggacacaggaaggggaacatcacactctggggactgttgtggggtggggggaggggggagggatagcattgggagatatacctaatgctagatgatgagttagtgggtgcagcgcaccagcatggcacatgtatacatatgtaactaacctgcacgttgtgcacatgtaccctaaaatttaaagtataataataataataaataaataaataaataaataaaaaatgatgagtttagacaaatatcattatggtagtattatattatgttatgttatattatattatattatattatgtataatgtatattccttgcagcctgccctgcattcccaatctatgactcatgctgccttattgatactgaaaaatctccactacagcatgccagcttttgaaagagagccttgggttctttcccaatacttaccttccttttagggcaacctatctgagtcctgtagcttgaaagatttcctaccagcctgccatcccaaaggaacatggatgaactatgtttatgctgatgtgtcaagtcatttcttggtatggttcatagtagtccacatggctcttgtagacaaagagatgaattactgatggcagaatttctgttctggcaacagggaaatttgcagaaaggagaccttttcagtgtgaacattttttgctcacaggtggtccaggatgcccaatgctaaatgagaagtgaaaagagcaatcagggccaggtgtggtggctcacgcctgtaatccaagcactttgggaggccaaggtgggcggatcacgaggtcaggagatcgagaccatcctggctaacatggtgaaaccctgtttctactaaaaatacaaaaaaaattagccaggcgtggtggcgggcgcctatagtcccagctacttgggaggctgaggcaggagaatggcgtgaacctgggaggcggagcttgcagtgagccaagatcgcgccactgtgctccagcctgggtgacagagcgagactctgtctcaaaaaaaaaaaaaaaaaaagagcagtcagaattcaatttttcattcagaacaaatcaatccacgtgggtaaacattttatcaaactcaagaatgctgtctttcagggtgcttttccctcaacagtcacttatttcctcttgcaagtagtatcttcgttcaggttcagtgactactgtgtattatatccaatgcttctggcaagtgggttggtggaggcagcccaagatcttctagaatcaagagaattggatccatttcccagttctaacacttatcagctatatggcttttaggcaagtcagttaaacatccgagtctcagtgctctcatctgcaaaacagaaaatgtgatgtacttcacagagccagggggaggaataactaaggtggtacatttgtacgtgctttgtaacctgtaaagccctttactgtacacgtgtcatttacagctctgtatcaccatcatgacctagaaaagcagtactgacagaagacttatcttcttgccaatgctaagataactttagccatttctgcatttctaaaggaaggagtctttatcccagtatctatgaagacttggcaggaattgccgtcaatatttagttggtaatataaacgaattaaacaaaaatgcacactaggttttaggaaaattaaagacagaactatcatttgtactcctcttacatttcccaaagtgctaaaactagacaataaatcagtcctcaataaatgcttgtttatcaattttatattcatttatttgttgataatacaacaaagatgtttatatgcagtataatatatatggcaaagatgaaaagtagcaaattcatgaatcaacatcctatttatgcttgagaagacaaagaaagtgttggtgacttcatggtatacataaccttaaggagctcgtgattgagcctgggtctctgctatcaatgtaggatataaatttcaaatgtactatcctttatatgtatgttaatgtagtaaacatagaaaactgatgctactagtgagaatacttttacttgaacaactaaaagtttgtctttaatcccctaagtgcatacacaaaaggaaagtactgtacaaatcaagtacaacagaagaagtaaagtaaaagacaagtgaaggaattatctggaacttagatctggttggctttttctcctgaagtacttagataaattaactcacttttctcttttgctgaagaagtgcaaattaggcaggcatgttattccacgtaggcaaaaggaaaaaagaaagaaaaacataaaatggctatatatttgaccaaacttcgttctgcaagaatcccaatactaaccttctaccatataaactactttcaaaatcaggctatatccttccagtacaaacctggtttgtactactcagagatactactcagaaatactttcagtatttcccttctttcaacttctgatgtgattctatccatattcccctgcctgtctcccagtcaaagagaatgggacacaactctctttagagtccatcagtgatgctttagctgccaaaaatagtgacaatagacattcattgtctgtctaccttacttgttcaacattcagaattctgcatcttaagaggctgtggctgaaaacttgagccagttcttcagaatttctaacatgttatttctgccactttttctcccttactttagcagagtaatttaattcaatttgagagagagagagaaaaaaaaaacttttctagttacacagatcaatccaattgtttggagcttcagaatgaatttttaaacttgttgaacagaagcatacaaatctctaagagcaagtcagataatatacaaagcctccattcattgtgtaggcagaaaggaatgctggtacccggcagctctctgaggaatgttcccttggctttgactattctgctgggaacaaggaaggaaacacatatataaaatgaatttataatgtctctggcttgtaatggcagaatgataagaaaagttggctgtttaatataaactgtcagttgcatattccaggcctcctctctttgaggttcctcccacatccacacgcctggctactgtttagtgcggagtacaaagtggccgtttattattattgactggtgaggcctgtgctccaaaattcattctgtcaacagaatgtaagcaaagttggcattttaaagcagggctctttcagtttctgggttttctcaggattgctatgcaacaggatcagtgctgtagtgcccggttcaagctgaaaatgttacacaggaagacataccatgtaaaggtcagattcttctactataataattttcttgatctgtgtgtatacaagtgaagttgaatgcataacctcttatcataactcttaccaaggtcctatgtactttccacctgtcaagcctaaaaatgtgtattaaatgggaaatcaaaactaataaatgtatgatgctgtactatatgtatgatgctataataccaaggtgaacttaatttgtgttgtcaagaagattttctctcccatgacagactcccaggaatgtgctggtgctgtgggccaagtgcaatcttgtttattagtctctccacgcttttatggtcagagttaactctacagattactacgtaaatagaaaatatgacttgatccatatagtaatgaaattattggcactggggtacactttatcatagaattttattgcctatcacttccataaaataatacattttgtccatagactagaagatataacttgtgaactttataaagttataaatacattactttccaactcataatggcaaggaataaatctattacaactaataagatgcccattttaaatctacataataacaggagaaggcaatacgccaagaaaagggatttgagatgtatcttcttgttagtttagcctgattgaaatgtcttttgaactaataattatttatattttgcaattctccaaattcacattcatcgcttgtttcttttgtttggtaattctgcacatattcttcttcctgctgtcctgtag

SEQ ID NO: 2158 - DNA, 50 bp, Homo sapiens
  source 1..50: mol_type = genomic DNA
gtaagtcaggcatttccgctttagcactcttgtggatccaattgaacaat

SEQ ID NO: 2159 - DNA, 63 bp, Homo sapiens
  source 1..63: mol_type = genomic DNA
tttccgctttagcactcttgtggatccaattgaacaattctcagcatttgtacttgtaactga

SEQ ID NO: 2160 - DNA, 48 bp, Homo sapiens
  source 1..48: mol_type = genomic DNA
ttgtaactgacaagccagggacaaaacaaaatagttgcttttatacag

SEQ ID NO: 2161 - DNA, 54 bp, Homo sapiens
  source 1..54: mol_type = genomic DNA
ttatttatattttgcaattctccaaattcacattcatcgcttgtttcttttgtt

SEQ ID NO: 2162 - DNA, 50 bp, Homo sapiens
  source 1..50: mol_type = genomic DNA
tgtttcttttgtttggtaattctgcacatattcttcttcctgctgtcctg

SEQ ID NO: 2163 - DNA, 250 bp, Homo sapiens
  source 1..250: mol_type = genomic DNA
ccaactcataatggcaaggaataaatctattacaactaataagatgcccattttaaatctacataataacaggagaaggcaatacgccaagaaaagggatttgagatgtatcttcttgttagtttagcctgattgaaatgtcttttgaactaataattatttatattttgcaattctccaaattcacattcatcgcttgtttcttttgtttggtaattctgcacatattcttcttcctgctgtcctgtag

SEQ ID NO: 2164 - DNA, 60 bp, Homo sapiens
  source 1..60: mol_type = genomic DNA
gcacatattcttcttcctgctgtcctgtaggacctccaaggtgaaattgaagctcacaca

SEQ ID NO: 2165 - DNA, 173 bp, Homo sapiens
  source 1..173: mol_type = genomic DNA
gacctccaaggtgaaattgaagctcacacagatgtttatcacaacctggatgaaaacagccaaaaaatcctgagatccctggaaggttccgatgatgcagtcctgttacaaagacgtttggataacatgaacttcaagtggagtgaacttcggaaaaagtctctcaacattag

SEQ ID NO: 2166 - DNA, 125 bp, Homo sapiens
  source 1..125: mol_type = genomic DNA
gacctccaaggtgaaattgaagctcacacagatgtttatcacaacctggatgaaaacagccaaaaaatcctgagatccctggaaggttccgatgatgcagtcctgttacaaagacgtttggataa

SEQ ID NO: 2167 - DNA, 45 bp, Homo sapiens
  source 1..45: mol_type = genomic DNA
gacctccaaggtgaaattgaagctcacacagatgtttatcacaac

SEQ ID NO: 2168 - DNA, 57 bp, Homo sapiens
  source 1..57: mol_type = genomic DNA
cacacagatgtttatcacaacctggatgaaaacagccaaaaaatcctgagatccctg

SEQ ID NO: 2169 - DNA, 57 bp, Homo sapiens
  source 1..57: mol_type = genomic DNA
cctgagatccctggaaggttccgatgatgcagtcctgttacaaagacgtttggataa

SEQ ID NO: 2170 - protein, 7 aa, synthetic construct
  REGION 1..7: note = Synthetic
ASSLNIA

SEQ ID NO: 2171 - protein, 12 aa, synthetic construct
  REGION 1..12: note = Synthetic
SKTFNTHPQSTP

SEQ ID NO: 2172 - protein, 12 aa, synthetic construct
  REGION 1..12: note = Synthetic
TARGEHKEEELI

SEQ ID NO: 2173 - protein, 9 aa, synthetic construct
  REGION 1..9: note = Synthetic
CQAQGQLVC

SEQ ID NO: 2174 - protein, 9 aa, synthetic construct
  REGION 1..9: note = Synthetic
CSERSMNFC

SEQ ID NO: 2175 - protein, 9 aa, synthetic construct
  REGION 1..9: note = Synthetic
CPKTRRVPC

SEQ ID NO: 2176 - protein, 20 aa, synthetic construct
  REGION 1..20: note = Synthetic
WLSEAGPVVTVRALRGTGSW

SEQ ID NO: 2177 - protein, 9 aa, synthetic construct
  REGION 1..9: note = Synthetic
CMQHSMRVC

SEQ ID NO: 2178 - protein, 7 aa, synthetic construct
  REGION 1..7: note = Synthetic
DDTRHWG

SEQ ID NO: 2179 - protein, 10 aa, synthetic construct
  REGION 1..10: note = Synthetic
GYTFTNYWMH

SEQ ID NO: 2180 - protein, 17 aa, synthetic construct
  REGION 1..17: note = Synthetic
EINPINGRSNYGERFKT

SEQ ID NO: 2181 - protein, 7 aa, synthetic construct
  REGION 1..7: note = Synthetic
GTRAMHY

SEQ ID NO: 2182 - protein, 11 aa, synthetic construct
  REGION 1..11: note = Synthetic
RTSENIYNNLA

SEQ ID NO: 2183 - protein, 7 aa, synthetic construct
  REGION 1..7: note = Synthetic
AATNLAD

SEQ ID NO: 2184 - protein, 10 aa, synthetic construct
  REGION 1..10: note = Synthetic
QHFWGTPLTF

SEQ ID NO: 2185 - protein, 116 aa, synthetic construct
  REGION 1..116: note = Synthetic
QVQLQQPGAELVKPGASVKLSCKASGYTFTNYWMHWVKQRPGQGLEWIGEINPINGRSNYGERFKTKATLTVDKSSSTAYMQLSSLTSEDSAVYYCARGTRAMHYWGQGTSVTVSS

SEQ ID NO: 2186 - protein, 107 aa, synthetic construct
  REGION 1..107: note = Synthetic
DIQMTQSPASLSVSVGETVTITCRTSENIYNNLAWYQQKQGKSPQLLVYAATNLADGVPSRFSGSGSGTQYSLKINSLQSEDFGNYYCQHFWGTPLTFGAGTKLELK

SEQ ID NO: 2187 - protein, 9 aa, synthetic construct
  REGION 1..9: note = Synthetic
YTFTNYWMH

SEQ ID NO: 2188 - protein, 17 aa, synthetic construct
  REGION 1..17: note = Synthetic
EINPINGRSNYAQKFQG

SEQ ID NO: 2189 - protein, 17 aa, synthetic construct
  REGION 1..17: note = Synthetic
EINPINGRSNYAEKFQG

SEQ ID NO: 2190 - protein, 17 aa, synthetic construct
  REGION 1..17: note = Synthetic
EINPIQGRSNYAEKFQG

SEQ ID NO: 2191 - protein, 7 aa, synthetic construct
  REGION 1..7: note = Synthetic
AATNLAE

SEQ ID NO: 2192 - protein, 11 aa, synthetic construct
  REGION 1..11: note = Synthetic
RTSENIYSNLA

SEQ ID NO: 2193 - protein, 7 aa, synthetic construct
  REGION 1..7: note = Synthetic
AGTNLAD

SEQ ID NO: 2194 - protein, 116 aa, synthetic construct
  REGION 1..116: note = Synthetic
QVQLVQSGAEVKKPGASVKVSCKASGYTFTNYWMHWVRQAPGQGLEWMGEINPINGRSNYAQKFQGRVTLTVDTSISTAYMELSRLRSDDTAVYYCARGTRAMHYWGQGTLVTVSS

SEQ ID NO: 2195 - protein, 116 aa, synthetic construct
  REGION 1..116: note = Synthetic
QVQLVQSGAEVKKPGASVKVSCKASGYTFTNYWMHWVRQAPGQGLEWIGEINPINGRSNYAEKFQGRVTLTVDTSSSTAYMELSRLRSDDTAVYYCARGTRAMHYWGQGTLVTVSS

SEQ ID NO: 2196 - protein, 116 aa, synthetic construct
  REGION 1..116: note = Synthetic
QVQLVQSGAEVKKPGASVKVSCKASGYTFTNYWMHWVRQAPGQGLEWMGEINPIQGRSNYAEKFQGRVTLTVDTSSSTAYMELSSLRSEDTATYYCARGTRAMHYWGQGTLVTVSS

SEQ ID NO: 2197 - protein, 116 aa, synthetic construct
  REGION 1..116: note = Synthetic
QVQLVQSGAEVKKPGASVKVSCKASGYTFTNYWMHWVRQAPGQGLEWMGEINPINGRSNYAEKFQGRVTLTVDTSSSTAYMELSSLRSEDTATYYCARGTRAMHYWGQGTLVTVSS

SEQ ID NO: 2198 - protein, 107 aa, synthetic construct
  REGION 1..107: note = Synthetic
DIQMTQSPSSLSASVGDRVTITCRTSENIYNNLAWYQQKPGKSPKLLIYAATNLADGVPSRFSGSGSGTDYTLTISSLQPEDFATYYCQHFWGTPLTFGGGTKVEIK

SEQ ID NO: 2199 - protein, 107 aa, synthetic construct
  REGION 1..107: note = Synthetic
DIQMTQSPSSLSASVGDRVTITCRTSENIYNNLAWYQQKPGKAPKLLIYAATNLADGVPSRFSGSGSGTDYTLTISSLQPEDFATYYCQHFWGTPLTFGGGTKVEIK

SEQ ID NO: 2200 - protein, 107 aa, synthetic construct
  REGION 1..107: note = Synthetic
DIQMTQSPSSLSASVGDRVTITCRTSENIYNNLAWYQQKPGKAPKLLIYAATNLAEGVPSRFSGSGSGTDYTLTISSLQPEDFATYYCQHFWGTPLTFGGGTKVEIK

SEQ ID NO: 2201 - protein, 107 aa, synthetic construct
  REGION 1..107: note = Synthetic
DIQMTQSPSSLSASVGDRVTITCRTSENIYSNLAWYQQKPGKAPKLLIYAGTNLADGVPSRFSGSGSGTDYTLTISSLQPEDFANYYCQHFWGTPLTFGGGTKVEIK
